United States Patent Application Publication US 2002/0147140 A1 - sequence listing, part 3

SEQ ID NO: 3889 - DNA, 7062 bp, Homo sapiens
agccctattaaccctggttggctttatctttcccctgaccctgtgcttaagttcactttctctctagctcttcctgctcttgttcccttcttgtgtacctgaactacatttaacatcctgactcaaaacagccgagtttctaaccatgctacttgttattgtaccatttcctttctaacccagattatcatctctgtttcaaatttcttgctgtggtaacctcaccttaatttctatgtcttcgttagctcaatagattgccatgatatttttttaccacggcccataacctctttaatggcttggcagcaggacctttcctttgattgtttcttgaagatatgagatctatagttcagttgtatcgttggctcttaagggcctggaacatgcaacaatagggcttccgttgttgcatggcaaacatgagaattttgcatggcccttactggggagtttcctcctcatttgactgatgtgagtagagactcttagagccagccaccatcataatcatctactagaatcccaagatgctttccccagcagctaatagcgctgttgtctgtgggtagggggaaaacaccaccctaaccctgaagaatccatgacatagtgctattactttgatgtgaataagtctggaaaatagtctctttctactgtggtttgctctataaaatccttgcctctgaattttcctgaaaactatgctttattctgacttacgggttagacaattttagtaagtatgttagtaaacaaatttttttaggggatcaggaaaagaaatagtgaacttgacaatggcattctttagttttcagtttggaatttaattggaaactcatttagattttaataaaaagggaataaatatatatcttgtatcatgtggatgccttaggctgtcagtaacagaacactccagtgaagaaaagatctcccagaacaagaagtccagaggaagggagagaaggaagacaggttcgggattggttaatttagtggctcactgatctaatcaaggaccccgacactttgcatctttatactctgccattctcagaatcttctctcatgattgtactctggctgtattgaatgcagactcaacagtgtcttatgaagaaatggaatatttcctcctgtacatctctttttgttagcaagacaacaatttcatggaaaccctccagtttttccctcaggtcctattgattaggattggggtcacttgcctttcttaaaccatctggcaaggggaatgagaccattatgattggcttgaaccaattaggagtcactctcctgggattggggagggccctgcctctaagtagttagctgcctgataattctgcaaaagctggcttctattagcaagggaggaggaggggaatgatgtagaataatgactattgtcaggccacagcatggggcattttacttacatttaaacataaggtaatacttagtttctgctacagaatttctaatacatgtacttaagagttttgctggctgggaacagtggctcatgcctgtggtcccagtgctttcagaggctgaggcaggaggatcgcttaagcccagcctcagacttctgtttgaggctgcagtgagctatgatagtaccactgcgtgccagcctgggcaacagagcaagaccctgtctcaaaattaaaaaaaaaaaaagaaaaagaaaagaaagaatgttgcctgactaagatccaggggtgaataccttagattaatgttgattatactcaaaactgcagactatttgaaaatagttcttaatgatgagaaaaagtcaaaggctctctggattcttttttatctttttggtgccttattaaagaatttagagaaattgcaaatgagagtattattttgatggtttttaagtacttcatactgttgtgttattcttagtactttcagttttcctcaggaagattattaggagaataataattttatatcttttgactgagcaaaaatgcacttaagattaatggattagttagatgtcagttttctgattgtgatattgtactactatagttttgtaagatgttaccacttggggaagctgggtaaagagtatatagcagatttctgcattatttcttacaattgcacttacctcaaaataaaacatttaatttaaaaaaatgtatataaacatcaggaggattagagtaataaagctacttaagagtagacccaaaatcctacagtcatatgtggataaagaaatggaaggtaaaaattaagaagcattctgctaatgttgtggaatgtaataattacagatgcaaacagaacaattattaccagtccacctgcttcgcaggaagataaaagtaataaagtaaattaaaccaatattttaagttactttttattttcttgggctcaagttgctacttccctggtttataattattagaccaacatctgaatagaagcttcaagggcagagatcgttttattcatctttgtatccccccaaagtgcttaacaccatggttttattacacatagtaagcagcgcccttttcaataacatctgttataatataaatgaagacttttaatgctatttcaattagcaaaattatattttgttttgtgactcttctcatttaagggacacctttgagagcagtttcattattaagcctaactcaatgatttccgtagtatattcttagacactatatgattatggaagagaaaaacatattaacaaatttttgttgccatacattgttatttttaattgccaataaaataattactaagagatatttgtagttaaaagtgtggggtttttggtggggcttattctgtaaaataggaaaaggcttaaaagatgatagttaaaaatggccgggaatggtggctcacgtctgtaatcccggcactttggtaggccgaggggggcagatgacttgaggtcaggagtttgagaccagcctgccgacatggtgaaaccccatctctactaaaaattagctgggtgtggtggtgggcagctgtaatcccagctactctggaggctgaggcaggagaatcgcttgaagctgggaggcagaggttgcagtgagcccagatcgtgccactgcactccagcctgggcgacagaaagagactctgtctcaaaaaaaaaaaaaaatatatatatatataaaataaaagatgatagttaaaaagataatagcttaggatgttacagtgatagatctgaaggtaacttgtacttaaggaacgagaacagtgagaaatatatgtttttaatggagttgatactatttcatgtggtctttggttttgaacaggtgtattacctgactgcttaaccgatggctctgatgtggtcagtgaccttgaacacgaagagatgaaaatcctgagggaagttcttaggtaccattctttaattgttttttaaatgaatcattattaatattatatgatctgtacatatgctttttgcccaacaaatatgaactaataaaattgctaaattctctactgaaaaccatcaaaatgatctatcaatttatgactgtggatatatttcttagtgacagaaaaagttattttcaggtaacttataccagatcagtccaaatgaaagggtctttttacacccgcatcataggaataggaaagtagccaccaatgggaaaaagttgcagtagacctagcctgatctctggagagaggtataatgacttgagctaaacagcttactccttggcttctggatctcactatggaggtggcatattctaggtgtcacatggtaggaggctgggcatccagattccacagattgaatagctgacttggtgatagtaaccttcaagggagggatgacagaggcgtctatcccagatgagtatcttgccggtctccttgtttccccagttaaatgattctcagccaaatgcctggcaaagagtgtgcagaccactaatggggtccacacagaactaagaaatggtaatggacatttctttttcttttgggcctgttgtgccctgacctttatgggaattttggaaggaaggggcagtagtagctcctaatttttaaatctcctgtgagaatatattagatttagggcaaaaggatgcctataatcacagtgtcacttgcagactgtggccttggcctttggggtcacttcttctccaactatactaccacacatgaccatcttctagcatcctacagttccccccacttaggtactttgtcccacctccaaagcagaagagaggatcagaggatgggcctgatgggaaactatggcaggagctccaggatgcagtgcttaatttcgggggtttgagtgattatggagagggtagcagatatgcagttgaactcaaccctttcttgccacatccctccttggatggcaggggcaaatgggagcctgagacaacacagaatgctttgagtttacaggtttgagatgtaagggtgtttggttcagaggactggtaaagttttgatttggactggttgtgttggttgattggtggcctgaaaactggtcagcactgtatttttagattttattttccaagagcttttgaggggatatactactgtgtaagtaatagaacttagttatgaacatgtataacagttgaccttggttactttcgaaaagcactgtctcagtgaacagtttacaaaagttgatgggctttggcacagtggtatcacaagtgcttgatgatagctcagatgccattggaacaatgacattttatcaagaggggtataatggctcttatcaagaggggtgtaattgatcactctaaagagggtgattgaagtccttattaatgggatttgccattcaaatttgggttcaggatttcaaatctgttgatctttattcagctagggttcattcagagttctagaagaaatgggtagacctgtattttgtgttactaactgtattatgctgtatgcctatgtatgtctttcccagttgactgtaagccactttagagcaaggcttgattatcttccatctttgtgtctaatgtgccttttattgtaagcttaggttagcatgttgcttagttgaatatttgttctttgaccaaaaaaggaaatttatctttttatcttatttttgtatatttcagaaaatcaaaagaggaatatgaccaggaagaagaaaggaagaggaaaaaacaggtgcctacagaacatataacagaagcattttattgctgttatctcttattaagtctacacctagatcttactattaaaatttatacttatgtggaactacataattgtaagtacaatgtaaatattgaccaataatattaatatatcaataattctatgtatgtcgtgcattactgctggccaccatattatatagtactatatatacttaactgtatatagtacaaacaccacatagtactaattaatcttacaggacatgcatataagcaagagtagtcattttttttggcaagtttaagcatttgtttttaacttttcagactttttctccttctttatttttgtcctggtaactcacagaacaacattttttttttttttttgagattgagtctcattctgtcacccaggctggagtgcagtggtgtgatcttggctcactgcaacctctgcctccggggttcaagcgattctcctgcctcagcctccagagtagctgggattacaagcgtgcgccatcacgcctggctaatttttgtatttttagtagagacggggtttcaccacgttgatcaggctggtcttaaactcctgacctcgtgatctgcccgcctcggcctcccaaagtgctgggattacaggtgtgagccaccatgcccggccagaacaaccttttatactcttttatttatttatttttttggagacagtctcactctgacacctgggctggagtgcagtggcgcaatctcggctcactgcaacctctgcttcccaggttcaagtgattctcctgcctcagcctcccaagtaggtgggattacaggcgtgtaccaccacgcccagctaattttttgtattttcagtagagacagggtttcaccatgttggccaagctgctcttgaactcctgacctcatgtgatccacctgcctgccactgtgcctggccaactttttatacttcttaatatataaagtatatactttttttttgagactgagtcttgttgtattgcccaggctagagtgcagtggcgtgatcttggctcactgcaacctctgcctcccaggctcaagcgattctcgtgcctcagcctccccagtagctgggattataggtgcctgccaccactcttggctaatttttgtacttttagtagacagggtttcaccatgttggccagaccggtctcgaactcctgacctcaggtgatctgctggccttggcctcccaaaatgttgggattacagacatgagccactgtgcccggccaaaagtatatactttcttataagagtgtatactttatactttcttttaaagaggccagacgtggtggctcactcctgtaatcccagcactttgagaggctgaggtgggtggatcacttgaggccaggaattcgagaccagcaacatggcaaaaccccatctctactaaaaatgcaacaattagccgagcgtggtagtgcacacctgtaatcccagctactcaggtggctcaggcatgagaatcatttaaatccaggagccggaggttgcagtgagtcaggatcacactactgcactccagtctgggtgacagagtgagactctgtctcaaaagaaaaaaaaaagaaaactataatatctttggatcctttaggtagtgaattagttaaaatgaatctaaattgtgtgttttttaaaaaattgtattatggaatcctgaagttatcagaggctaaaacagaagagcccacagtgcattccagtgaagctgcaataatgaataattcccaaggggatggtgaacattttgcacacccaccctcag

SEQ ID NO: 3890 - DNA, 593 bp, Homo sapiens
attctcctgcctcagccttctgagtagctgggactacaggcacctgccaccactccgggctaattttttgtatttttagtagagatggggtttcaccatgttagccaggatggtctcgatctcctgacctcgtgatccgcccgccttggcctcccaacgtggccggaagcagtggttcttaagctttagcaagcattggaaatggttggagggcttgctgaagcacatatggctgcctcccagtttctgatttaataggtctggggtaccgataatttgcatttttaacaatgatatggtttggctgtgtccccacccaaatctcatcttgaattcccacgtgttgtgggagggacccagtgggaggtaattgaattttgggggcaggtgttccccatgctgttcttgtgatagtgaataagtctcatgagatctgatggttttgggaaaggggagtcttcctgcacaagctctctctttgcctgctgtcatccatgtaagacgtgattgctcctgtttgtcttccgccatgattgtgaggcttccccagccatgtggaaatgtaagtccgattaaacctctttcctgtgtaa

SEQ ID NO: 3891 - DNA, 593 bp, Homo sapiens; identical to SEQ ID NO: 3890

SEQ ID NO: 3892 - DNA, 2688 bp, Homo sapiens
tagttcctcttgcatgaaaacattgcaactcacatgaaaatgggtggagctatatagtcatcttatgattagagaaacaaataactgggaataaataaaaaaaattacctcagcaggagaacatcatttataactttatattttttgggaaaaaagtatattttacattctaataaactctacatattttatgggacatgaatgtctgcacatatgtactgaaatgtgttaatgtgcacagactaaataatatattctgttttcagttaacagtattaaatttgacttgttaatattttcattgtaggtatattgaagcaagtcaaagattacattaaacagtgtagcaaatgccaggagaaactagatcgatcccgtccaatatcagatgtttcagaaatgttggaagaattgggactagaccttgaatctggagaagaaagtaatgaatcggaagatgacctgagcaactttacttcatctccaactacagcatccaagcctgcaaaaaagaagccagtatccaaacatgaacttgtgtttgtaagtggtactctccagtcagctttaagatttgtaactagtgtactagtatttgcagccttggtgacttatttttctcaaaccactaagactgcttattgaataagacaaaatggcagtgtactgtgttatataagctgaactgcctcttcatttatcataaatgttcctgttattttttcagaatgaacttaataattacctgttggtttgttgttaattatcctccctcccttcttttgtgatgatatattggtacaagtagacagatttacatttctggaagcagtctctgagtttacgccccaaggtaaaattaatctggccaggtctttgtttttcacctgcatcagtttcatacatcatcatatttctgattagtaagaagaggcagccagaagtgagatacagattttcattaggtgaggtagaatgaacatggcagaaaataggataggacaacatatctttttatttaaatacataggtaacaaagaaaatatcaaattattcatacctggtaaaaggtaatatgtaatgtgtcttgttttaaagcttgttaagggtaaaaaatacaggtaatatgttactcttgctctcaaacttattttgacaggttgacaccaaaggagtggtaaaacgttcttctccaaaacattgtcaggctgtcttaaaacagctgaacgaacagagactttccaaccagttctgtgatgttactttgttaattgaaggagaagagtacaaagctcataaatctgttttgtcagcaaatagcgagtattttcgagatctttttattgagaaaggagctgtttccagtcatgaggctgtggtggatctttctggtaagggttttgtattactcttgctttttgtttgtaatgacattctagaagagggggatatgtatgtcttccacacacggactttatgccaaagtaagagaagcccactaacaacagtagactaagctgtactgaaaaggttctttttagcaagatttctgtggtagagttatggaaaagggtgtcatttcctttcactacgtcttaagtgagacaattatagcagaaaaagaatttctaggatttaaactgttaaaaacagtttgagtgaaatccataagtgcaacaaaattattacattaaatgaatatgttatttaaaaattgattgtttaagctaggtgtggtggtgcccgcctgtagtcccacctacttgggaggctgggatgtgaggatctgcttaaggtcaggagttccaggctgtggtgtgtcattgtacctgtgaatacccactgctctccagacggggcaatataacaagaccctgcctctaaaaataaaaagcaaataaaaattgactgtttatgtcttattttgtgggacatgtaattatagagtattttataagtcttttggtttttaaagattaatccttagagtttattaagttcaataatcaaattatcaatatagaaaagtcaaaatcccaggtttgttttttgtttgtatcattattgtaaataaatagttcaactttcttttggcttcactagaatttatatattggcttatgagtcatcaaatgaaaatttaggaagaattataggtagcattatttatacgttttctcatcatataaaacttgctgtaacttttgaattacttaaatcactttgaaatattttttcctttttgaaacaaaaaagtgacttttccaggtatgtaaattcttaattatttaaccacttatccttttatgctttattgtttttagtcctacctcttctgggaagatacatttttccttagcagtggctttatgtttatagaaagcaataataacggccaggcgcagtggctcctgcctgtaatcccagcactttgggaggctgaggcaggcggatcacctgaggtcatgggtttgagaccagcctgatcaacatggagaaaccctgtctctactaaaaatgcaaaattagttgggcacggtggcgcatgcctgtaatcccagctactcgggaggctgaggcaggagaatcgcttgaacctgggaggtggacgttgcggtgagctgagatcacaccattgcactccagcctgggtgacaagagcaaaactccgtctcaaaaaaaaaaaaa

SEQ ID NO: 3893 - DNA, 912 bp, Homo sapiens
  SITE (547): n equals a,t,g, or c
gctttctctatataaataaatatttattaagcatccactgcatacaaagaactagcctaggctcagggggtgtacatatgagcaaaaactttttggagcttagagttggcattacattctagattagtggtattttttttttctgggtttggtgactcaaaggagaaaatacgtcttacactgagccatctgaatataaaaacccatcacaggttattcttttgatatgtttgctttggaattttttccctatatttcatgcatctgaaagcatgagtgttgctcttttctggtttctcagcagtttatagcaaatgaaatgtctgcctgaaaaaaactatggcacagcatcctaatattccaacataatacatcatttagtcttcattccatatgcatatttttgtatattgttcagcaagtattatgtaagccaatcataggtgaaataggcattattttaaaaatatgtttgatttaaatattaagtagataaggctgggcacagtggctcacgccagtaatcccaaagctttgaggcagtatntagctgagctcagaagtcgagacctcccggacaacatggtgaaaccctgtggctaccaaaatttacaaaaattagccaggcatggtgtcacatgcctgtagtcccagctactttggaggctgaggtaggaggatcacttgatcccaggaggcggaggttgcagtgagctgagaccacaccactgcactccagcctgggcaacagagcaagaccctgtcttagccacaaaaaaaaattttatcataagtgtgtcatttacggtatcttagtctgccgtacccctggattttgaagtcctcaccataatttttccttctgttataattgtccatttcatttgagaggatatttttataaagttttca

SEQ ID NO: 3894 - DNA, 564 bp, Homo sapiens
ctcctggtgattttaaggtggtgcaatttccatgacaaaccagcctaccaggtgttgtttgtccacctgagaaaacttctatttgagtattggcaccaaaattagagttcttattcttcaaaaagttgaaaaacagctgaggtcaatctcccaaaaggcaacaacgtttccattccaattcataaagtcgcgaagcagtaagatctgaaggacactgttttatttttatcggagatgaagcttgtttttatttacaatttccctggacgggtttaagccctgagaaggatgaattaactctgcctttgtatattaaacattatcaaacatccccatgcagatattatgttattaaaatgagtcctgtgtgtgagatcattctatcttgttacattgtacactagggcaaactatttagaataaattgaaatgaataattaatgaaagagaagagaatacctctttcaagttcccatatacacttgccctgttcttttttcttggcttctcttacttcctctttccactctttagtgtcattttgactcatttcccctcactgtt

SEQ ID NO: 3895 - DNA, 319 bp, Homo sapiens
atggccaggcacggtggctcacgcctgtaatcccagcactttgggaggcggagacgggcggatcacgaggtcaagagatcgagaccaccctggctaacacagtgaaaccccgtctctactaaaaatacaaaaaaattagccgagtgtggtagtgggcgcctgtagccccacctactcgggaggctgaggcaggagaatggcgtgaacccgggaggcggagcttgcagtgagccaagatcgcgccactgcactccagcctgggtgacagagcgagactccgtctcaaaaaaaaaaaaaaaaaaaaaaaaaagaatatggc

SEQ ID NO: 3896 - DNA, 183 bp, Homo sapiens
ggtgggttcgtggtctcactggctcaggagtgaagctgcagacctttgcggtgagcgttacagctcttaaggcggcgcatctggagttgttcgttcctcccggtgggttcgtggtctcactggcttcaggagtgaagctgcagaccttcttagtgagtgttacatctcataaaggcagtgtgg

SEQ ID NO: 3897 - DNA, 28897 bp, Homo sapiens
aggttactcactataaacaatatccacccaacacaagcaaagtttattcctactttgaatgccgtgaaaagaagacagaaaactccaaattaaggaaggtgaaatatgaggaaacagtattttatgggttgcagtacattcttaataagtacttaaaaggtattacttttcctagtatattttaaacactgcttattactcttaactcctttaggagttcttttagaatttttaacaaatctgttaatttggatgcattaaatcatataatttggtgtgtgtttgatgttctaagtatgagaaaagttttctgaaataaaaggtttttttttttttttggaaaccgagtttcgctcttgttggccaggctggagtgcaatggcatgatctcaactcagcgcaacctccgcctcctggtttcaggcaattctcctgcctctgcctcccgagtagatgggattacaggcatgcaccaccacacccaactaattttgtgtttttagtgaagacgggctttctccatgttggtcaggctggtcttgaactctcgacctcaggtgatccacctgtctcggcccaccaaagtgctgtgattacaggcgtgagccaccactcctggccgaactaaaagttttgaaataagtttagaaaagtcattaatttttggaggctaatcttgtttgttatactttagtcattaattcaaagtaaaggagttgttaatgaactggaaactccttttgaattatggtagcaatcagaatatttttatattagccagttttaccttgaagacctatttttaaaaactacctgtgtctctggacttagttgcaaatgcatattaaaacaaaaatcccccaatttctgtgctttcttatttgaaaggccatttctagggggaaaacagttcccaaacacattatacatgttggaaaagtttatctctaaccttttgaattaaacaatttcagaattgaaaacagtaaggtgaattttaggccaataactcttttctataatcttgactcttttaagattaggcagttcagatagtcttatactactgaaaacctagctagatatcagaagtaattattagtggcaagaataccaaagttaataccaaagtttttttgttttgttttgtttttagacagggtctcactcagtcacccaggctggagtgcagtggtgcaatcttggctcactgcaacctctgcctcccaggctccagagatccttcctgctcagcctctcaagtaactgggaccacaggctcgcaccaccatgcctggctacttttttatagtgacagggtctcaccatgttgaccaggctggtctcaaacttttgagctctcaagcgacccgcccgccttggcctcccaaaatgctgggattacagacatgagccaccacgcctggccccaagatactttaaacgagtttactagttatcttgtattaagttaccagcaactgatagcacactttaatttagtcatacaacttaagaactttgtaaaatattactcatttttaattataactaaaatgtattgattacctattctaggccagcattattgtaagtggttcgtatgtcttaactcattttgtcctcacaaacatcatataagtgggtactcgacttttatcctcatttacggataagaaaagttaattaaaagtgtgttgtttggggggcagacatttagtaattgtggaaattactgacttaccaaccctaaagatgccacattctttacgaacgaagtgagacgtttcatttggatgtaagaagcttttgagtcatctcaaagttgaaaagtaccaaaattaatcgagagaaaaaaattaagttaatatcatttttaaaagctgtgcaagtaataattttttctattacacatctgcttttacaataaataaacatttatactttgagttattaaaagtacaaattccttttctgactctgctgttgactctgggtgagcatttaacctcttagttatatttttaatccatagaatgggtgaaatagccaaagatattaagtctgtgacagttcagcaactcacagaatgcacctttagaaatgtaaacaggacatgtatattcttctaggtaaagtagtaaccaaagagaaaatccaggaagccaaagatgtctacaaagaacatttccaagatgatgtctttaatgaaaagggatggaactacattcttgaggtaaaagatggtttcatcttttgatctgttttggtttttctttcagttcaaaacttcttgcaaaggaatttgtttttgttttgtgttttttgagagaaagtgtcactctgtcacccaggctggagtgcagtggcacaatctcggctcactgcaacctctgcttcctaggttcaagctattctcctgccttagcctccttagtagctgggactacaggcacgcaccaccacacctggctaatttttgtatttttagtagagatggggttttactgtgttggccaggctggtctcaaactcctgacttcaagtgatctgcccaccttggcctcccaaagtgctgggattacaggtgtgagccaccatccccggccagaatttgaataagagattagagtatcattacagttcttttttgtttgtgatctgaatataatggctatttcatagccattatatatccttttgaaaagttatattatagccaatatatccttttgaaaagttaaggttgacattttatccctctccccgcatcccccatgttaaatcattagcatatagaatctacagcaagtctaagtaattaataaaaatgaattataacttaaataacatttttgagaaagataattcattcttgaaaatacactataggtaggaaagggcatggttatttggcaatttcaaaatgtaggtctgttttcttgactgaaaatagatgctgtgagtctatcactacacataattctgggaagtttctcactgtatagtgagaatggcttggtgctgatccacaaagttgatttttagtcttgattgtattatatttatatctagtatgtttgaattcattgcctaaatattaaggcactcaaagacatggtaatagaattataagagttaaatatcccgtggtggtttccttttattacaatgatcagttgggaatggaatctgttggcgtatcttgatgttgagtgttacttttaagtctcacaaacgaaagtttcttacattgaaaagactgtcaaacacagaataattagaaatactttaactttcatgcctatatgacaatactgagctatactatttggtacttatgggtcttgaaaaagtcaggtaagtactctgtgctgcacttttcctgtatcttaaataaggtcaatagaatctgtgagctatcacctgtacttgctccatttctcttctgtgaggtttgttgtaaggataaatacagtaataagttaggtactatgcttattactatactgtccagtggccagggcaataagtcgtttgattatatgatcagaaaatcttggggaactaaaggttctctagagataatctggtctaaccccattttacaaacagaatctgagaccgagagatggcaagtgactagtccagggtctccccgctgcttttgagtccaaactaggacctgtagggcaatgttctttttgctatacactgtgcctccagtgcttgtattaaacagatttttcttgtatttaattaccttgtcccaaatcacataaataaattatcaggatttctgaaacagcttgccttcctagtgaaaagttaggcacagctcttagctttaaaagggaggtacagtgtcacataacaaataaccttcagcctaattttggaggcaattattacattaagaggaagtcagttaagtcatactcgagtgttaattgccaagattctgtgtttggcctgtctcatagtttcaggtccacgaccagaatagagggaacctatttcggttcttctgcagggatttccctagctctccttctctctcgttttgttttcttttgttctttaatagcaatcctttatctttcaatctgcagcctttattttgtgaaaataacgaatttagaataaaggtagtgttcttggaatacttttagaatatgttggaataaagtcatcctttctcattttctgaaaaagcagggaagaagcaacagtttggttttgatgagtttggaattttctgccacttgtagtgataaatgttcttagcagaagcacgtggcagcattaaacttaaaaattaatatcagtacgtatgttaataattttaactagttttattttagaaggataaggatattctgactagattacagtaacatctacaattgcaatttctatgacagtaaatttagcttctataaaacgtaaagaacctttagtaaaacagcagggaattgagtatcatctgttgaataaataaatttatcattttatcctgccagaagtatgatgggcatcttccaatagaaataaaagctgttcctgagggctttgtcattcccagaggaaatgttctcttcacggtggaaaacacagatccagagtgttactggcttacaaattggattgaggtaaattgtttttttaattcttatttaacattaattgaataaagaccattgaactgagattacagtttagaatttgttactaataaagctatataatctcctataatttacttaacctttccaggcttcaatttcctcatctataaaatgacagactaaataatctttaaggtttcttctagtagaatagaatgttctgagattttgtttaaatcaaattattgagagtgattgtttttaaaacctagttggctttcatctaattcattgccattttaagtgtgtattattttagagcaaacttagaaaaacagcacatttctagtaacttacgacattcgatgaatgataaatgttcaagttagactaaaggaactttattccaacttctagtaactactttcttcatttttctctcatcagtttaggtcttaggatctaccatctgttacttttcagtttctcatctaaataaaacaagatctgctgttcatattgtttaatttctcaggaagggtacattttgggctttgggtttatactgcgagccttttttttgtttttcttgtatgtatacctaagtagtcatatgttttcacatggtcagagttttgataataatactctacctagcttctgaacagtttaataatagatttaatccgtgagaggaaataccctcgaaagttactatagaaataacaccttactatctggtggcatttacttagttcttagaactgactaattagtttatcggttaaagtaatttgctattatattgtaaaatagtacatttgaggctcacttataaaaattggaaaacatcgaaatataagaggtccaagagggtgtttgaaacacattttgctaagttgacaggaaattaatagactttttatgggccattaactaataatacactcaaaaaaaaggtacagttaaataaaggttttaaatagtctataccgtatactaaaactaaattaatatttaggactgaaataacatattgattaagtaccagctatgtacccaaaaaatgctgggcacagaagttagagtaagatgttttacttaaagggcctttgagtgagagttggcaattcattctgaactaaccactaatatcattaagaattagtgctgagttggtagcaggaaataggtaattctgtctaaaggaatcatgaaatggaaaataaataagcttttaataaggagaaggaagagctgaagaaatggcacagtgttcttagaatgacagatagtcctatggggactgcagcataaaagtgaaaaatgtataagataaacctttagatggtaagcaaggcaagattctcaaattctgtatgaatcagctccacctccgccccatggacagtagatgaccgttaatggcttttaaggaaagatgcaacctggaaaaaaagaaaaaaaacttgttttagaatggtaaccactggcaatatgaagaataattagactaaagaagagaggtaggataatcatgggcattggcagtggaattgaaagagtaatttcagaagcagaatggtcagatgttggaggtgattggttatagagtttaagaattgtactgattttctattgtgtaacaaactaccccaaaacttaatggcttaaagcaactattatttctcctgattctgtggttgactggatggtcgtctgctgctcttgcttagacttaggcatctgcatttagctgagggttcagccagggctggacatcctttaatggcctcattcccatgtctggggcctcaggtcagatagctgggactaccgggtctcactccagaagaggtttcttcagagcatggtagtcttggggttctaagagaatgagagtagaagctgcaaaacctcttgaaactggggcttgggagtcacacatgactttctccacattctgttcgtcaaaagcgaatcataaggacagcacagactcaagggataagaaaggagattccatctcttgatgagaagagctgcaaaggccatatttaatcagtcacaggagtctaatgctacaaagtagttttttaaaaagatgactagattggcaagttcaaggttaatctttttatttgttttatttatatatcacttagctggtattcagtaaaagcttgctttgtaaaatttagttaatatctttttggttcagcacagacattgcatcatcttagcagctctttttcaaacagatttgaagctgcttcaaataacaatctggtttataaaatgaaaatagaaaattatgatcttagaatgaagaagtgaatttctaagccatgataattattacggttgctgtgattagacagacttttctgtggagcttcctgacaaccaagaaaaaaggggaaatcaaggaactgttcttatcagaaagtaggaacccagcaattctttcattttctcattgggaacttaatagtcactgaattacaaagtagacagtgaccttgattatacaacatatgcggaagtgtttcctgtaacttacgtgagtattttatcaaatacttatatatttgataaaagctaagtacataaagcataactcagtagatagaattctctagtagtaagctaaagtgcttcaagtattagttgtcatattaatccaagagaaaattagatctgagactacctcgaggagtaaacgaacaacttctttaaaccaatactagtcaaaatgcagtccacggaccaatgctggttcatgccctatttgatccaagtccacattaagtacagaaatgaagagtaagcatttagaaacttggggcaatttgacattgcctcaacatccaagtttcagtgtcctttataaactattgatccatgacagatcatgaaactttctaaaaattgatccttttatcacatagtctttcaaaatattatttgcttctttgaagctttggatagaaacttgataatgtgaagttctctgctatgtggacctggtgtgcttatcttctttgttgctgatttgagagctgagctatgtactatatctggaatgcacacagcaggcatcctgctgcgcagttctgtgtctagttaatagtatggaagttcaggacatacctccaaaaaaaaaaaaaagctaggattttcctcagaaagaatgcagtattttatgtcttaatatttgtggttaattttgttactacagactattcttgttcagtcctggtatccaatcacagtggccacaaattctagagagcagaagaaaatattggccaaatatttgttagaaacttctggtaacttagatggtctggaatacaagttacatgattttggctacagaggagtctcttcccaagaggtaagtaactgaaaccaacctcatttaatataatgtggattgttggttagagtaccactgtaaacttttggggacgttattgagattgatcttggttctaaaattccaaagattcaaccaacagatacatattcagtacctactactgtgttcagggtacatgggatatgtccttcaacagatgtccctgtcctttatatattagatggatggacagatggatagccagaaacagacataatatatcagatgtgaaataatgccataaagaagctcaaggcagggtaagggaagagagagtgatgaaaagtgggggtgggacactgttaaataggtctctttgaggagataatagttgattttttaaaatatttaggaaaaactgaatctttgtcattaggaactgttatgtctgacaataaatactttcctaagagaaagacaattcttatgggagctatgctatattccttaaatgtggttggctgcatcctggtattattaatgtgggtttctttctgttttggattttggtttatgattgattttccagactgctggcataggagcatctgctcacttggttaacttcaaaggaacagatacagtagcaggacttgctctaattaaaaaatattatggaacgaaagatcctgttccaggctattctgttccagcagcagaacacaggtaaaaaattctgttcattttttaaaactactaattttttcactcttgtatttgtaactcagtgacattttacctaactgcagagccaggtacctacagtacatcttcatgaacttgagcaacacaaattcagtatttatacaaaagtataaacattagtcttagagaggcagagaaattttatccatgctagaagaaacagtttaagagcttttttccaatacttatattgccatagaagttttcttttaaggaattttttttcaattactgtattgtcatatgtaggtagattttattcattaaatttagaagcactcactgtaagtaccagccactttttgccttttccctgtcctcctacatgaccttatctatatttgccctagaaattgtcatctgtactgtaccttcagttgtagatgagaaagcaggacctgttgaggaaagaaagggtgttcagattctttttacgcttccttgtctgctttcagtaaactatctccagttacccaagaaagaaattacaatctaaactgcagctgctctggtcctagagctaactttattaaaagtaaatcaggttgttttttttttttttttttttttttttttttttttttgagacggagtctcgctctgtcgcccaggctggagtgcagtggcgggatctcggctcactgcaagctccgcctcccaggttcacgccattctcctgcctcagcctcccaagtagctgggactacaggcgcccgccactacgcccggctaattttttgtatttttagtagagacggggtttcaccgttttagtcaggatggtctcgatctcctgacctcgtgatccgcctgcctcggcctcccaaagtgctgggattacaggcgtgagccaccgcgcccggcgtaaatcaggttttttaaatgtttgccaaaccttatcactgacttttataacaaaattatttactataatcattagggaatatttaagttctgctaatacttaaaattgcagagtgctaaaaccagcagtgagtttagaatcaagctaagctttattgttgctactatttgaggcatattagttgactggtgttcatatgcaaggcagtctactgggtgcaacaagggttagaaggatatttttaaaaaactgaccctattctcaggatgaaaataatacactagtaatagtctgctctgttggttaactcctcgtaaggaggtacaattaaaatgctgtagtgttgcaagggaaggagaggaagaatcatattccttcactagcaggatcaagaaagcttttatagaaatatacaaaatcttcacttcttgaaggattggtaaaatttaatagccaacattgggcacttattcattctctgagtaaatatttattgcatgcttatcttgtatcaagcattgtgatgaaagcacaagaatgaaagaggagggagaatgtttagagaataagggctgaaacacagattttgtagggagcgtaggggagactgagaagacaggttcaggttagtaagggcgctcatattttgacactgaatgttaactatgtgcacatcatgctagctattctaaatcaggcattttcaaatggaagcaggcactgacatttttgagcaaagacgtgatgttatgagataaatatcttaggggacttttttatatttttatagcaggatatctatcctatggattgaaaaaaggaaaaatcagaaggtagtctttataggaagctattccagcagtcttaaggtaatgaagtccagaccaaggtgctaaataaatggaaagaaataggtaaacatgagcaatggcttgggagataaaattgctcaaagttggtaatttgagttgggactcagtagaaaatagattcagctgacgtttatgagcattgtattagtaaggccttgttgaacacttttacatacaactttcaagactaggaaactgggaaaataagagtgtctttaacaaagttttaagagttatttttagtttggccttagatgtacatacatcttttaaaaatctaacatagtatgcacatattagactcttcgttgatggttatttcaaagtagtaacatcatgatacggaggacaaggataatatcttctttaggacttgttaaaatgaaaaggatactgtatgtgggcaagggataaaaatccattttatttttatggtctcatattgattgcatttgtaaaatttgactccttatatattcaaatgcctcacatgttcttaatagaatgtcttttaaacaacagcgtagtatagcaaaaagaggattggactgaaagttgggaaacctgggtgaccttccggctgacatagtgggtggccttgggcaagtcacttatctctctgttcttcatttcttccatccaaccaaacaaaaggaggagctaaagttttacatctccaacatgacaaggtcattgatgataaatgagctactatctaaataactttaaaataagagaactctataaatttagaggtttaccactattgtatgtatcttaatagatgaatctgcacctaaaaatatttaattacagaagctttttttctcaaactttggaaaggtatcaaatttaatttggtgcttgaaattaggatttatggcattggtagaattcattgattatttatgatcttcatatatcacatactgtactagaagaatagaggttatgattggactagacagagagtgccagagcaagtatctgtgggatgctgagatgaagatattcaactttctatctaacaaagtagatccagagcctggaagaaaaacagaggctaagatacagatactggaaaccctcatgcagggactttttttttttttttttttttaagcttttgagtgtttcacacaaggtatgttacagaagacaagtgcctaagtcagaactatgagaaatattgccatctgacaggttagattaaagaaggagagcacagcatctgggaagactgaaaagggaaccatagaaataggggaaaaaaggtgaaacatgggagatgtcattgaagtcaagagaaagaaagcatcaggaaaattcaggtgtcatggagaaagcaagtaagatggggacagtgaagtttgctagacatgatacaagtagatcgttaggtgacttactgatacaacgttataagtagtgaccccttaactgtaggagttaattcatacgttgtaaagttctccagtattggtattcattgatcttaattctctcctttttaaagagaaaagttgcagacctgaatatgaagaggagcttctcttcagtcatatcttaattttccatttagcctacagatgcatgaagtagagaattgacatcatagctactggcagcctctgtagctgttaagaagagtgttcactaatgagttttatataaacaggttctctctcaattttggattcgggtagtagtctttacaatcttgaaatgtgcatgctgcactaccccaggtataccattgacagtatggggaaaggttctaagtctagtcctttaaaaaaaaaaacacacacacacattgtataaagtgattatttcagacataaagtctgactcttcaaacagttatgagttaaacttatacctacttgggctttataataaatgaatgtgctatctttttattatttactgaggagaacagattagaggcggactagaaaattagggagaatgaccaattgcttggcataattaaatggtaattttcaaaattaagttgtttgagatcttttaaaattatttacattatatattaacaaatatttacacaggttgagcatcccaaatccaaaatgctccaaaatctgaaactttttgctcaaaggaaatgctcattggagcatttcagatttcagaactggatttcagatttcagaactggggatgcttaactgataagtataatgcacatattccaaaatctgaaaaaatttgaaattcagaatacttctggtcccaagcatttcaaataagcgatacccaatctataattacatattgaatacaaatctatcccgtaagaactgatattaaggacattgcaaaaatcactataaccattcttatccaatagaaactctcatactttattttccatcttaattatgttttgcttaaactaagtatttgaattcttattccctgggcatatattaattcgtagtagataatctgcaaacaaaatacatgacttcctattactagccacttgaaaatataacaggtagttgactatatgtatgtatggtatagtataaataattgcctctaagtataagattttgaaaggtaaaaaaacaaaatgtatgtctgtactattattggtatatagtttcaaaaattcacagaagggagccaggtgctctcattgcctaacaaaataatggaaatatgtattcattctaacatcttgacatacagtataaagggcactcagcaagtgctttttagttagactgattttaaatgagtagattcaggaataccagaaaacacacacacacacagataattggttgaaaatacgaggttagaaacttaaccattgaagaggagtaaggctacttaaagcgttaaaaactaattgggtaaggtatggttgacccagctacttcatttgccttacgatgtatattcattaaactaagtcactcaccttctctgtgatgttgatggtttggtatagtaaacatgagatatgattaaaggtgattcagggatagatcaagtgtctgcctaagtaaatctgtgttttcatttttttttctagtaccataacagcttgggggaaagaccatgaaaaagatgcttttgaacatattgtaacacagttttcatcagtgcctgtatctgtggtcagcgatagctatgacatttataatgcgtgtgagaaaatatggggtgaagatctaagacatttaatagtatcaagaagtacacaggcaccactaataatcagacctgattctggaaaccctcttgacactgtgttaaaggtaaattttcatatgtaactttattattagaatccctctgtaggccagctgcatcaatactacttttcatttatatacacacaatttcagagctgtgtggaccagtcccctttattttagagttgcagcccagagagagtaatagatttgcctgaggtcacacagtaatagcacagaaggataccaagacttatggattgttttactgtcaattagacatttgaatagatattttgttttctgcttacctgcaaaattaattaacagcattgccattttaattaatcctatgatttgggcaccaaacttatttgcagtttgtttctttttcagcataagtcactgctagacctttgaagttgttagcacagaagaaataggaacagggtgatgtggaataaaaataattcaaaaatactcttcaagtggaggttctttagaaatactgttgattcataatgtagcagtgttactttttgttgttaatgttcaaggacttggtttatcttcttcaaaaagtagtaatagcaggcttatttgatgcctactactagaaaaatattttaggtgatttacataagatacgccatttaatctctacaaaaaaaaacagtgataaatattactgtctctgttatagaagaaaaaaacagaggcttaaaaaggttaaagtaacttgctcaaggtcacacaacatgaaagataaggagtcagatatccagtgtaggtcttttggctgcagccttgctacttgaccacaccatttgtcagttaatgagcagatgatacttaccccttaagaaagggaaacagaattaaggaggtcttttcttattctattaaatgataggccaatctgaaagtcttgtcttagcctgcaatatttggttttagcaaacttgataggtttcatgtttttactgttacgtaataaaaaatgtacacagctagttatgagaaactgatttcatcaatggggaattttctctttgttagaatctttaatcagtttatttaggaaaaagaaatgattgttgtgggaagagaatgtatttcttttgtttatatgaccaagctttctgagaaattttaatttggtgtacaaaacttttagtagttagtgaatgagtaagatgatttgtgtattgtgcagtttggctttaagagcaaaggagaacttagagactatgggttctagatgctgtgtctgcctttcacagtttctctgaactttgtgattgaactggattcatattggagttatatatcagacaaaaaccaaagtcattgggcacaagcagaataagtccaaattaaaagtataatcatgagtttgttaaataatgctttatatacttctttaaaatatacttatttaatattaaggatttttttttccttgaatccatataatttgaaaggtctaaggggaaaaacttgttttgagccactttatgatgtgaattcacttcataggaaataacatgcttgtttttaatgtactttaaccctttaaagtacactggaccaaattttagagagcatatacatagtgttataaaatttttaaagtagttaatttttatattctcgattatcaaagcaaaatcatttaactttgaaaagctcttatacttgttttcagctttagttatttgtgttgcatgtgtatttttccatataggttttggagattttaggtaagaagtttcctgttactgagaactcaaagggttacaagttgctgccaccttatcttagagttattcaaggggatggagtagatattaataccttacaagaggtatgtgttttatattaaaagtttcaataaggcatttcttataattaagtttgtttatgtttgataaagaacacaatataaatacaattttaagtctttgtaagtgtttatgttggtataaatctctgtgcattgcttaaagtttagaaataatagtagtttaaaatacagaggtgccagccaagccatacttactcttccagttgtcattggccaccctgaatgatgaatctaaagaagtatcattgtgaaacaaggaaatgtcagtcaagaaatattccttggaatataaaacaaagccttgactctgctggcataggtctgagttttcatagactggagcttcacaaatctgtaaaactcataatattaatgggtgctttttcagaaattatagaatagctgccacctcttctaaattaagcattgactgtcatcagtattagatttagccagatagtataagtgttatgcaggcgtacctcattttattgtgctttgcaaacattgcatttttttacaaattgaaggttgtggccaccctgtgttgagcaagtctgttggtgctatttttccaacatgtattcacttcatgtctgtgtgacacatactggtaaattctcacaatatttcagactttgtcattatatctgttatggtgatctgtgattagtgatcttcgatgttactactgtgattgttttagggcaccacagggcacacccagataaggcagtgaacttaattgataaatactgtgtgtgttgtgactccttcaccagttacccattccctttctctgctcacttcaagtttccctatgccctgagacacaacagtatttaaattaggtcaattaataaccccacagtggcctctgagtattcaagtgaatggaaaagtcacatccctctcattttaaatcaaaacctagacatgattaagtttagtgaggaaggcatgctgaaagctaaaataggcctcttaaggcaaacagtaggccaagttgtgaatgcaaaggaaaagttcttgaagaaaaatcaaagtgctactccactaagcatatgaataagaaagtgaaacagctttattgctgctagggagaaagtttgaatggtctgaatagaagatcaaagcaaccacaacatttccttaggctaaagcctaatccagagcaaggccctcgtttcaattctgtgaagcctaagagaggtgatgaagctgcagaagaaaaattggaagctagcagaggttggttcctgtggtttagggaaagaagccatctccatgagtgcagaatgaagcagcaagtgctgatgtagaagctgctgcaagttacccagaagatctagctaagatcattgatgcaggtgactaaacagattgtcagtgtagaggaaacagccttccattggaagaaggtgccgtctaggactttcataactagagagaagacaacatctgctttgaaaggacatgctaactctcattagtggataatgcagctggtcacttttaagtggaagctagtgctcatttatcattctgataatcctaggacccttagaatttgctgaatctactctgcctgtgctttataaatggaacaacaaagcctggatgacagcatgtctgtttacatcatagtgtactgagtattttaagcccactgttgggaccgactgctcaggaaaaaaaaaaaaaaaaaagattgtttcgaaatatcattgcagatggcatctgagatctgatggagatgtacaaagaggttaatgttgtttttcatgcctgctaacacaacgtccgttcgacagcctatccatcaaagagtaatttcagatgctattatttaggaaatatattcttggccgggtgtggtggctcacgcctgtaatcccacactttgggagaccgagacaggcagatcacgcaatcaggagatcaagatcatcctggccaacgtggtgaaaccccgtctctactaaaaatacaaaaattagctgggtggggcaatgcatgcctgtagtcccagctactcaggaggctgaggcaggagaattgcttgaagggaggcagaggctgtagtgtgccaagatcacgccactgcactccagcctgggcaacagagtgaaactccgtctcaaaaaaaagaagaaatatattcttaagtctgtagctgaaagggttcaccattctagatgccatttaagaacatcatgcttcatgggaggacgttaaaatgtcagcattaacaggagtttggaagaaattgattccaaccttcacagataactgagtcttgatttgacttcaagacttcagtggaggaagtaactacaaatgtggtagaaatagctagataactagaagtggtggagcctgaagatctgactgaattgctgcagtctcatgattaaacttgaacagatgaggatttgcttcatatgggtggatacagaaagtggtttcttgagatgaaatctactgctggcaaagatgctgtgaacatcgttgaaatgacaacaaaggacttcgaatatcagtaaaatcagttgataaaaccaaagcagggtttgagaggatgcactcccaattttgaaagaagttcttgtgtgggtgaacgctatcgtaccaaacagcatcgcaagctacagataaatctttcgtgatagagtcaattgacgtgacaaacttcattgttgtcattttaaggcattgccacagtcaccccaaaaccttcagcaaccctgatcagtcagcagccatcaacaacagggcaagaccctccaccaacaaaaagatgactcactgaaggctcaagtgaccattagcattatttagcaatgaagtatttttaattaaggtatgtatttttaagacataatgctattgcacacttaatagactacaatgtagtataaacataacttttatatgcaatgggaaatcaaaaaattcccgtgacttgctttattgcagtggtctggaagcaagcccacagtattttcaaagtatgcctgtattgtcttaaaatttttgcctcgtttactaaataaggttcttaagggccataatttcatcataacacctaaaatactctgtagaatatcactaacataatgtaggccatttgcattcagaaaccactgacattttgatgtatacgaatctcagatggtatctacagctatgaaacacaagtttttttctgttcgaaagagtttggtggagatagagtaaggtcagtacccaaattatagtagttttccaaagattgttgtacataatacttctcacttccaaatcaaacagtatttctgcggtgatggtgtatttagagttccaatatgaggcgtccggaatagatctcttgtaataacagagatgaggtttcttccactacctcttccaaactgccttgcttaagagaagtgggaattccttcagctaagacatttggtgttgggacataggggctttcatgtggaaaggaaaaaagaaatagaagaaaagtctgcagggagaagggggaggaccttacacatagcaatctcagctgacacacctaattgccgttttccccttagctcagctgaactgacagtctcttaccttggtgtcagttaagtactgttcccaggtgcctttcaggcactttagcacttacgtgtatacacagacacacacacacacccctcccccttgcaggtgaaagaacatggcagggtactgtatctgtttcagaaatcccattagcctgcctgttgctgtgcctacctttccttgttccagcagtcagctgttggattgttcaggcaagttgaacggagttcaagttgggtgttcagtcaggtactcaaaactttcctttcaaaaatcaaagctcttcggctttcttttccttcttttctttccttgtttatataaactttaggaatgtatgtgcgattttttttttttgacagggactcagtctgtcacccaggcttagtgcagtggtgcagtcacagctcactgcagcctcaacctcccagggtcaggtggtcctcccacctcagcctcctgaggagctgggactgcaagtgtgtgccaccacacctgactcttttttttttttttttttaatgttttgtagagatgggggtctcactgtttcccagtctgggaaacagtctcaactgtttggcctcgaactccttgactcaggcctcctaaagtgctgagattacaggtgtgagccaccattcccagcctgtatgtgcatctgtatagttgagaatcagcccaaaactgtacatgaataaactacataaacaagaatattgagataaatactctttggcattagtgaaacttaaacagaacaattagaggattgaatcgttttgtgttaatgcagatgtactcaggaaggaaaaatatctttttctcttttttttttttgagatggagttttgctcttgttgcccaagctggagtgcagtggcacaatctcagctcactgcaacctctgcttctcgggtagctgggattacgggcgtgtgccaccacgcccggctactttttggatttttagtagaaatagggtttcaccatgttagccaggctggtctcgaactgctgacctcaggtgatctgcctgcctcggcctcccaaagtgctgggattacaggcgtgagccattgcgcctggccagaaaaatacctttaaaaagctgggcctgttggtgtacctaaaggataatacagatgttcctctcaacttagcatggggttgtgtctcaataaacccatttttaagttgaaaacgttaagtggaaaatgcatttattatacctaacctactagacctcgtagtttagcctcccttaccctacaggtgctcagaacacttagtagcctacagttgagcagtcatctaacacaaaacctattttatagtaaagtgttgaatatctcaagtaatttattgatgttccactgaatgcgaatcacttttgcaccgttgttaagttgaaccattgtatgtttgtgaccatctgtacttgtaatttctttacattcattggtatgaaaaatatgttcttagaagcaggaaaaagaattcagttttgctttgtatactaaattagatgctgtaattttgataaaatgaaaaatctgctttatttgcaacaattgttttcttccttgacgtcagcctcactcttggactttgctattcagcctgtcacccctgtgaattcccatgaggttgacagtgtaaacctgctctaagttttcactttgcactgtgtaccaaaatgaaactgcttatttaggaaaataaaaatatcttttgtgttggacaaaatacagagcgcctatcttctttttctgttgtgtttcagttatggattcagtcttcttgggtatcattgaaacttctattggagtgatttattaaaatattaacatagtattgcattatcagagttggcaagaggaagctttctttgaagtctcacatgtattaaatgtttttcttcccagactcaaaattcactttaactccaaattgtctaaattttaaaacttttggtaaagaaacttggcctgaaatacagtgatatgatattagatgatactgttctttgttatttcctcattttgtttttgcctctgaagcatatctaaaatgaggtgacaggtcagaaactattttctctatattttaccttaccctccatctacctgtttcccttttcttccccttttctgttctactctttgcatttcttctgtattgaaattcactttgttcacaattatttaaaggaaaacctgaactcaggggccttgggtacctttaggttcaggtacaataaagacatgagactggatttgcgtgcatcctaaaagaatcacttttaaataagttttatatgttttcatcttgattcttctagattcatcttgattcaaattagatggttggcatttaaaaagaaagttgcatttctaaatgtagatttgtttaaaaatgaagttgcttgggatttgttgggttttttcctttgcagtgttgaaaacaaagaaagtcaattcgagactattaaaaaagtcaatttgagactatttggtgagaatgtggtaactttgatacacataaggctgttacacttatgattttctaataacttctgaaagttctgtttaaaacagagtcagcctttccagttgctttctgtttgactattctcatgaaataaatggttaccaaacttcacttgccacattctatcatcaaagtgattgaatatattaaggcagatgctaggtaaataaacttgactttggtgaaagaaatacaaatgacattggtaataaacacatctttaaagttgtatgtcccttgaaagaactcttttagaactgttcatacaggtctctctagctggtttataactaatcattctcccaaaaatgatacagtaatcttaacacccacagcacctgtgcataattttgtttctggcactggtatatcagccagaataaaatgactctaccagtataccaactgttatataggagaagtattttatactcttttgccaccaatatctttgattcttacatgttccattacatatgacatgtaattatacagtgtattgtgacttattggtgatgattacagtcattcctagagtctagtaaattggctcccattgcttgtgttgctgagatctggacaataacttaacgaggtgaatgagagaagttgactcaagtaatcttagatatttatagctagttttttctcactttctctcatttccttcactccccgaatcctaccagaaccacagtgacagcaatgcagattcaggaactatgcatgaaatcctctccttccacacatatccatcttttgggggtgggtgggtctttaaaaacaaaatgcgggctataattatttattgaccgtgttataaaacagtcttggatgcttcattcatcaatattgtcccttgaaaataatctccattctcttccaaattaaggtttggtttggttttgttttgttttaatcttctagattgtagaaggcatgaaacaaaaaatgtggagtattgaaaatattgccttcggttctggtggaggtttgctacagaagttgacaagagatctcttgaattgttccttcaagtgtagctatgttgtaactaatggccttggggtatgtcaccttttaattacttctgtgttactaccttccttatgtatctaggtagaatgtggttattgagtgcatttgtcaaagattgatgtggccgtggactgttaatatgttgttgggtactactgaccttaactcagaaacaaggaaagaagggagatattaggtaataacagacctaaggagacagagatttggaaaaaggaagaacaataaggaaaaagattatttaagagagataatacaggtcagtcatttcccactgccgtttttacctttagatcaaaaagtaatatttgagtaggaatgtcagcttacctagccatcatatattaaagacaagcaagtatataatcactgaccaaactgttacaggaaggtagaatatgaggtttggattgttataccacagtcatgttctagtagccatagaacagctaggcaagtgaacaacaaccccccttgcttctttgtaacgtcttgagagctggagattctatagagcaagggacagaggcaggaggatgctaagaattaagaacacctgagttgattccctgcttcactctttgatctttctttggaaagttctgggattgactcatttgttgctgcttgttccactgccacttgtttctgtttctttgctgcctacctttctgatgtagaaacactctgctgtcttcaggttctctaagacttttgcttctgacaataacaaggcaaaagtaaaaagtaccaaaagagggatacgttatgaaataggaaagcctttaccttagtaatactcttgttccctctccaaagattgtgtgtgtggttttggcgtagttggtatagttgggcttttcttcaacagcatgtacatgctgtgcttactgtcagtttaaaggcagtttgtaatataaagagataccttaagggtcacatgttagaatgctcacagacttcctacaaatggagtattaggtgttcttcagtggcaaaaaggatatccaagatgtcatactttttctttattacaaacgactatccttcaaaacaggctaaagtgttatgtttctgaaagccagatgtggattggttcagttatacctattaagtgcttaaaacttaaatgtaaattatgtatgtgcttttttgtaagggagtgtttagacatttctgatgattagtcttctacttgtctaactttcttaatttggatttcagattaacgtcttcaaggacccagttgctgatcccaacaaaaggtccaaaaagggccgattatctttacataggacgccagcagggaattttgttacactggaggaaggaaaaggagaccttgaggaatatggtcaggtatgtatctatgctgattggtttttttaagcaatagtaggttggctcaccaaattaataagaaaggaggtttttatgttattgtttttgtggaagacaaagtattatattttattataaaatgtccaattgctgacctggcctaccaaaataagatacaaaacaagtgtctacgtcataaacacggggcctgtgtatacatagggagaaatattacgtaagtatagtgattgacagcaagtttgtatacactttatccaaaagcaaactatgttactttaatataaaatgtgaaaacaaggtgacttgatttggattacataataaatggtgaaaccttgatttaaccaagttttctgattcaaatcaaccaaactagaaaaatttacagtacactaaagtagttcatatgatctaatggtctttagcatacaaaagtacatttatatttgtgaactcaagttaaaaaatttttggtttttaagccacttgatcaaaaaaaactttagacagaactattcatgaatattcatattattagaaaaaagtacactaaacatgagtgcactattacttcctattttgattctttatactacatcacaattactgcttataacatgttacttttacatttattaaggttttgagccagaattgaaataactttgttaccgttaatgaaaaaatatgtttgtaaatcaaacttttagaattagatccctttatatagcctgttaggcaattatttgagtaagctttgtgtaactcttgtacctactaagattttggcagatttagtttatcctagatgagctaaagtcacttcaaactaaaagtaaaaatctaagtgtgatttttaaaagacactgatttaagagtatgtgaatgatagtagaataaactagaaaataattcataatcatctaggcaatttgatttaagagtaggaactagtattcccttaaatttaaatttgtgaaagaaaatgctacagctaaagcactgtggtttgaagcaacacaatgacagaaatattagataatgtcatatgcacctcaatcttcagactaggtggaaaattgagattacttctgtggatttttcagagagaaaccagaagcaggtaactccttagtgagacaggagtggctctaccagacccaaagggaatttaatttcttcaatctgtctttgctactcttgtatggatgaagtggattacctttgtcattgacttttggagtataaacagaatctttaacccagtcactgtgtgttagtcaagaatgcaatacttgtttttctttgtttctgttttgggattggcttttggctttttgtgggttttctagacccaaatttagcactagcaaatttcttaaacttccatttgataagtttaatcactgttgagtttgttggccaggaacaaggcagggtttaccaggcttttttgctgcacactcacaatgattacagttctccctaggcacccaggcatcttccttcagcctgaggaaaaaaaagattggtcagctaggtttcttggttttcctttaagaaaactggtttaagaatgtagtattaaggtcattccttttcatagaagttaaatatttctacataccaggcaactcagtgattggccattttagatagtaccttgttccactagcattttttatgcatcaaatcatctcacaatttgaacaccattggcatctctgtatttgactggttggttagtctaattcatcaaaccaggattcaggtattttgcttaataatgtaatataatcatgaaatttccatttatgcaggatcttctccatactgtcttcaagaatggcaaggtgacaaaaagctattcatttgatgaaataagaaaaaatgcacagctgaatattgaactggaagcagcacatcattaggctttatgactgggtgtgtgttgtgtgtatgtaatacataatgtttattgtacagatgtgtggggtttgtgttttatgatacattacagccaaattatttgttggtttatggacatactgccctttcattttttttcttttccagtgtttaggtgatctcaaattaggaaatgcatttaaccatgtaaaagatgagtgctaaagtaagctttttagggccctttgccaataggtagtcattcaatctggtattgatcttttcacaaataacagaactgagaaacttttatatataactgatgatcacataaaacagatttgcataaaattaccatgattgctttatgtttatatttaacttgtatttttgtacaaacaagattgtgtaagatatatttgaagtttcagtgatttaacagtctttccaacttttcatgatttttatgagcacagactttcaagaaaatacttgaaaataaattacattgccttttgtccattaatcagcaaataaaacatggccttaacaaagttgtttgtgttattgtacaatttgaaaattatgtcgggacataccctatagaattactaaccttactgccccttgtagaatatgtattaatcattctacattaaagaaaataatggttcttactggaatgtctaggcactgtacagttattatatatcttggttgttgtattgtaccagtgaaatgccaaatttgaaaggcctgtactgcaattttatatgtcagagattgcctgtggctctaatatgcacctcaagattttaaggagataatgtttttagagagaatttctgcttccactatagaatatatacataaatgtaaaatacttacaaaagtggaagtagtgtattttaaagtaattacacttctgaatttatttttcatattctatagttggtatgacttaaatgaattactggagtgggtagtgagtgtacttaaatgtttcaattctgttatattttttattaagtttttaaaaaattaaattggatattaaattgtatggacatcatttattaattttaaactgaatgccctcaataagtaatactgaagcacattcttaaatgaagataaattatctccaatgaaaagcatgacatgtgtttcaatagaagaatcttaagttggctaaattcaaagtgcttgacatcaaaatgttctagagtgattagctactagattctgaatcatacatcacatctgactagagaccagtttctttcgaatgattcttttatgtatgtagatctgttcttctgaggcagcggttggccaactatagcccaaaggccaaatttggacttctttttataaatgcagattgtctatggctgctttcccactactccagcctaaggtaaacagctgcaatagaagccaaatgagaatcgcaaagcccaaaatgtttattaacctgccctttacacaaaattacacaaaaagtttcctgatctctgttctaagaaaaggagtgtgccttgcatttaaaaggaaatgttggtttctagggaagggaggaggctaaataattgatacggaattttcctcttttgtcttcttttttctcacttaagaatccgatactggaagactgatttagaaaagtttttaacatgacattaaatgtgaaattttaaaaattgaaaagccataaatcatctgttttaaatagttacatgagaaaatgatcactagaataacctaattagaagtgttatcttcattaaatgttttttgtaagtggtattagaaagaatatgtttttcagatggttctttaaacatgtagtgagaacaataagcattattcacttttagtaagtcttctgtaatccatgatataaaataattttaaaatgattttttaatgtatttgagtaaagatgagtagtattaagaaaaacacacatttcttcacaaaatgtgctaaggggcgtgtaaagaatcaaaagaaactattaccaataatagttttgataatcacccataattttgtgtttaaacattgaaattatagtacagacagtattctctgtgttctgtgaatttcagcagcttcagaatagagtttaatttagaaatttgcagtgaaaaaagctatctctttgttcacaaccataaatcaggagatggagattaattctattggctcttagtcacttggaactgattaattctgactttctgtcactaagcacttggtatttggccatctccattctgagcaccaaacggttaacacgaatgtccactagaactctgctgtgtgtcacccttaaatcagtctaaatcttccagacaaaagcaaatggcatttatggatttaagtcattagattttcaactgacattaattaatccctcttgattgattatatcatcaagtatttatatcttaaataggaggtaggatttctgtgttaagactcttatttgtaccctataattaaagtaaaatgttttttatgagtatcccttgttttcccttcttaaattgttatcaaacaatttttataatgaaatctatcttggaaaattagaaagaaaaatggcaaggtatttattgttctgtttgccataatttagaactcacacttaagtattttgtagttttacattcctttttaacccattcagtggagaatgtcagcttttctcccaagttgtatgttaagtctattctaatatgtactcaacatcaagttataaacatgtaataaacatggaaataaagtttagctctattagtgaagtgttaaa

SEQ ID NO: 3898 - DNA, 445 bp, Homo sapiens
agttgcaacagagaaattatggctgtaaaaactaaaatagtttactgtgaggcccttcacaggaaaagtgtgctgatctctgctagagtataaagagaatctagggctaaaccatgagtaactcttgaaggttaagtggcagaacatgagcagaccaaatgacaagcatagctaaagagatgaaagttccaaccagaaggagtgaagtcacaaaagccagaggaaacatttttcagcccagctgttgaatgctgctgagagatcaaataggatgaagaatttaaaacagctactggatttagccacctggaaataattggtgccttagacacattcctttccaggtagtagaagaggcttatttctgaaagaagctcccttatatacctctttgaatgtgggttgcgaaaagggaggagagaatgaggcaatagtatctttgtcc

SEQ ID NO: 3899 - DNA, 449 bp, Homo sapiens
caaaacaggatttttttttactttgctgctttactttgctgccaccgccgttgctgtcatccaggttttcatagtgtcactgtgaaggctaaaagtgatcatcctcagtacctcattgtacaagtaaagtagtcatgttaagtcattgacttttggaacataccacattgagatattagcagtaccaaattctgctgtctttcagttcattcctttctgttgtgtgtgcccattaggcagctgcttctctctctcttcgcctggatgaaggactgttccccaaaaccaaatgaaatacttttccaacctagaggccttgtagtagatttagtgtgcttgtatgtaaaatttaacgctctcctgtggttttaagatactgaactctgaaaatatcttagatacttattttttatttggtatagccaggaaaagaaactggttaatagcaa

SEQ ID NO: 3900 - DNA, 2968 bp, Homo sapiens
gtggaaatcaggaaaggaagttggaaggatccattaatgacattaaaagtgatgtgtgtatttcttcacttgtattgaaagcaaataatattcattcatcaccatctttcactcacctcgataaatcaagtcctcagaaatttctgagtaatctttcaaaggaagaaataaacttgcaaagaaatattgcaggtaaagtagtcacccctgaccaaaagcaggctgcaggtatgtctcaggagacgtttgaagagaagtatcgtttgtctcctaccttatcttcaacaaaaggccaccttttgatacattcaagacccaggagttcctcagtaaagagaaaaagagtatcacatggctcccattcacctccgaaggaaaaatgcaagagaaagaggagcaccaggagatctatcatgccgaggctgcagctgtgcaggtcggaagacaggctgcagcacgtggcgggacctgccctggaggctcttagctgtggggagtcttcatatgatgactatttttcacctgataatcttaaggaaaggtattcagagaatcttcctcctgaatctcagctgccatcaagccctgctcagttgagctgcagaagtctttctaagaaggagagaacaagcatatttgaaatgtctgatttttcctgcgttggcaaaaaaaccagaacagttgacattaccaatttcacagcaaaaaccatctccagtcctcggaaaactggaaatggtgaaggccgtgcaacttcgagttgcgtgacttctgcccctgaagaagccctaaggtgttgtagacaggctgggaaagaagacgcatgcccagagggaaatggcttttcttacaccattgaggaccctgctcttccaaaaggacatgatgatgatttaactcctttggaaggaagccttgaagaaatgaaagaagcggttggtctgaaaagcacacagaacaaaggtaccacttccaaaatatcaaactcctctgaaggcgaagcccagagtgaacatgagccatgttttatagttgactgtaacatggagacgtctacagaagagaaggaaaacttacccggaggatacagtggaagtatgtgaatctccttttccaagtcaccttcgctaaataaacatgtaacagtgcatccatattttaaatttatcacaactttttcataacttatttccccatttactcctctttttacttaaagaatgtgcatttgatcattccaatgataaactctttaggaatagatgacttgctgtcttgtggaacttctagacttattggttaagtctgttaggaatctatttctccaagacttttccttcttataggtcaaaaggataagtagtccatagtatgaataactgaggggagtgaagtctttttccttattccattggagtcttggcgctgcagcgtgtgtaaagatgtatacgatagagagttttttaaaacctagggttcttaatagtgaggctatttaaagaaagaaattaaggtagattaagccatcgattgtatcatagagaaagtgtgaaaaactacttttagaaatctgttgtcaatattgatttttgaagaaactttggtcagtgttaactatgaagaaacatttaaacatttttgatcatttgtaacaagccttgtttaacttgtacttattttgcttgaagcatcacttgaaaaggtttactcctattcataatttaattgtaattataataaaccatatcattttattaaaagtcaaaacaataaaaaattttgcacttcacagttataagcacaaataggttccagcaaccaaaattgaagaaatcttgaactttgaccgtctttacctaaagattaggttaaaatttgagtgagaacgcattctctctgcatgatttctctgctctacaaatgttttaactgcctctttgaaggtggagaagtcatggtagcgtttgaaatcatcacagacatgttacataccttttccttgagtatacgctccccaaaattgtttcacaaaaagaatgaaaataattttatgtttttggcctgctatttatatcttggctttctgaacatatattaaatttgacaagaaactgtattttatgttccattagccttagtatgtgttttcaaaatatttattttaaaatgttgactcaaaagttaatataaaacaatagatgtgtaaaattctttggtagttaagaatatcctgttctgaggtttacattctccatctttccagttttcaccttgtgtattttttaagcttttgaataataatgacatggaaatgtaaattaagtaggaaaaagctggtagcaaacagtgtggcatggcctaaaatccccgtgttgctgggagtgtgctagtcctcggaagcaggtgtgttatgttctagaacactgcccccctgcgtcgacagcctccggggttgggggtaagtagaagggggtgaggggccagcactagttgactcaaggcaccctggtggggacggagaggttttttcgctcagtggtgcaggccatcaggcaggggtgtccaggcagggcccgggtgcaagaaaacattctgtgtgcgctagtgcgagaggatcttctacagtcacctgccttcatgccattacagacagacgggaagtcactgggttctaggacataaaaagacctacatgttggctagcctaaatcgaacccttttatagtaataaagattcatcaatgttttaaactgtccactgtcagccccctgggactcaggtgaaccaactctctttgggaatctatcttagaagatgaaaccataaagccttcagtttcaatgtcagggatgcacactctatatctggtgaaattatggaggggtgaaaacttctgtacagcaaactgtacctccaaatctttaatgtcgaaataaagggctttttgccatttctgttttcagttca

SEQ ID NO: 3901 - DNA, 2967 bp, Homo sapiens
gtggaaatcaggaaaggaagttggaaggatccattaatgacattaaaagtgatgtgtgtatttcttcacttgtattgaaagcaaataatattcattcatcaccatctttcactcacctcgataaatcaagtcctcagaaatttctgagtaatctttcaaaggaagaaataaacttgcaaagaaatattgcaggtaaagtagtcacccctgaccaaaagcaggctgcaggtatgtctcaggagacgtttgaagagaagtatcgtttgtctcctaccttatcttcaacaaaaggccaccttttgatacattcaagacccaggagttcctcagtaaagagaaaaagagtatcacatggctcccattcacctccgaaggaaaaatgcaagagaaagaggagcaccaggagatctatcatgccgaggctgcagctgtgcaggtcggaagacaggctgcagcacgtggcgggacctgccctggaggctcttagctgtggggagtcttcatatgatgactatttttcacctgataatcttaaggaaaggtattcagagaatcttcctcctgaatctcagctgccatcaagccctgctcagttgagctgcagaagtctttctaagaaggagagaacaagcatatttgaaatgtctgatttttcctgcgttggcaaaaaaaccagaacagttgacattaccaatttcacagcaaaaaccatctccagtcctcggaaaactggaaatggtgaaggccgtgcaacttcgagttgcgtgacttctgcccctgaagaagccctaaggtgttgtagacaggctgggaaagaagacgcatgcccagagggaaatggcttttcttacaccattgaggaccctgctcttccaaaaggacatgatgatgatttaactcctttggaaggaagccttgaagaaatgaaagaagcggttggtctgaaaagcacacagaacaaaggtaccacttccaaaatatcaaactcctctgaaggcgaagcccagagtgaacatgagccatgttttatagttgactgtaacatggagacgtctacagaagagaaggaaaacttacccggaggatacagtggaagtatgtgaatctccttttccaagtcaccttcgctaaataaacatgtaacagtgcatccatattttaaatttatcacaactttttcataacttatttccccatttactcctctttttacttaaagaatgtgcatttgatcattccaatgataaactctttaggaatagatgacttgctgtcttgtggaacttctagacttattggttaagtctgttaggaatctatttctccaagacttttccttcttataggtcaaaaggataagtagtccatagtatgaataactgaggggagtgaagtctttttccttattccattggagtcttggcgctgcagcgtgtgtaaagatgtatacgatagagagttttttaaaacctaggttcttaatagtgaggctatttaaagaaagaaattaaggtagattaagccatcgattgtatcatagagaaagtgtgaaaaactacttttagaaatctgttgtcaatattgatttttgaagaaactttggtcagtgttaactatgaagaaacatttaaacatttttgatcatttgtaacaagccttgtttaacttgtacttattttgcttgaagcatcacttgaaaaggtttactcctattcataatttaattgtaattataataaaccatatcattttattaaaagtcaaaacaataaaaaattttgcacttcacagttataagcacaaataggttccagcaaccaaaattgaagaaatcttgaactttgaccgtctttacctaaagattaggttaaaatttgagtgagaacgcattctctctgcatgatttctctgctctacaaatgttttaactgcctctttgaaggtggagaagtcatggtagcgtttgaaatcatcacagacatgttacataccttttccttgagtatacgctccccaaaattgtttcacaaaaagaatgaaaataattttatgtttttggcctgctatttatatcttggctttctgaacatatattaaatttgacaagaaactgtattttatgttccattagccttagtatgtgttttcaaaatatttattttaaaatgttgactcaaaagttaatataaaacaatagatgtgtaaaattctttggtagttaagaatatcctgttctgaggtttacattctccatctttccagttttcaccttgtgtattttttaagcttttgaataataatgacatggaaatgtaaattaagtaggaaaaagctggtagcaaacagtgtggcatggcctaaaatccccgtgttgctgggagtgtgctagtcctcggaagcaggtgtgttatgttctagaacactgcccccctgcgtcgacagcctccggggttgggggtaagtagaagggggtgaggggccagcactagttgactcaaggcaccctggtggggacggagaggttttttcgctcagtggtgcaggccatcaggcaggggtgtccaggcagggcccgggtgcaagaaaacattctgtgtgcgctagtgcgagaggatcttctacagtcacctgccttcatgccattacagacagacgggaagtcactgggttctaggacataaaaagacctacatgttggctagcctaaatcgaacccttttatagtaataaagattcatcaatgttttaaactgtccactgtcagccccctgggactcaggtgaaccaactctctttgggaatctatcttagaagatgaaaccataaagccttcagtttcaatgtcagggatgcacactctatatctggtgaaattatggaggggtgaaaacttctgtacagcaaactgtacctccaaatctttaatgtcgaaataaagggctttttgccatttctgttttcagttca

SEQ ID NO: 3902 - DNA, 1120 bp, Homo sapiens
ggacacatgactaacgctttccaacctgccattttcatatgtatcatgcactctccacccacaataattctgcctcccaaaagagcatattatagtcaatgaggtttaaggtttcttcggttcagtcatgtggaagttttgctttcctaaaattatagctggatcactttgattggatttgggatattacccaaatgctaatcaaatattaaaaggcaatcttttttgttatgtgattgctacagattactgctcttacagtttgattcttcaaattttcattctcagaagggaatcttaaacccagtttgaagggtaccttgtccacaaccacttttaaattttggctaacttcccaaccttccaccatgttctgggaaaactttttctgctgttatagtatgtatgtattcaggaagtgcaacattattaaactaagcataattcagaagctaagtttcctttcatcaaaatttaatattacgaattgtgcaaagaagtatgttactttgatcagctttattttagagcttctttatcaagttatcatcagtcctcttgaattatttctgaaataaggggaaggaaggaagggaaaaaatatgaatgcatagatagatctaagcagatgccttcagagccctggaataatcctagctgggatatgggacatgaaaacaactctggcctactgctgctgggggctgttgcatggtgtgacataggaagtaaaatgttgctgtatgaataggaaggagggtcttcctgtcaatgagaattaatgttttcctaatgatttaacttttttactgaaaaaataatatgtgtacatggtaaaaatccaaattgtatcacagaaaatacagtgaataaaaccatcctcttaagagggtgtgtacatttataaatttgcctatgattgcctataaagtcaaagaagttgcaccagtatgcatgactgccaaaagtacataaactgagcatatccatttccctacattcttgcaaacattgtgccttcgaactttttggcctctgatagaggaaaaatggtaactccttgttttattttttatattcattattccttttgtaagattaaatatcatctcatgaataa

SEQ ID NO: 3903 - DNA, 1755 bp, Homo sapiens
  SITE (2): n equals a,t,g, or c
  SITE (4): n equals a,t,g, or c
ananttttttgtttttttatttattctgagaagttgaggcaaatcagtattcccaaggatggcgacaagggcagccaagcagggcttaggatatcccagcctaccaatatgctcattcgactaactaggagggtgagttggccctgtctcttcttttttctggacctcagtttcctcagtgagctggtaagaatgcactaaccttttgatttgataagttataaattctgtggttctgatcattggtccagaggggagataggttcctgtgatttttccttcttctctatagaataaatgaaatcttgttactagaacaagaaatgtcagatggccaaaaacaagatgaccagatttgatctcagcctgatgaccctacaggtcgtgctatgatatggagtcctcatgggtaaagcaggaagagagtgggaaagagaaccaccccactctgtcttcatatttgcatttcatgtttaacctccggctggaaatagaaagcattcccttagagatgaggataaaagaaagtttcagattcaacagggggaagaaaatggagatttaatcctaaaactgtgacttggggaggtcagtcatttacagttagtcctgtgtctttcgacttctgtgattattaaccccactcactaccctgtttcagatgcatttggaataccaaagattaaatccttgacataagatctcatttgcagaaagcagattaaagaccatcagaaggaaattatttaggttgtaatgcacaggcaactgtgagaaactgttgtgccaaaaatagaattccttctagtttttcttgttctcatttgaaaggagaaaattccactttgtttagcatttcaagcttttatgtatccatcccatctaaaaactcttcaaactccacttgttcagtctgaaatgcagctccctgtccaagtgccttggagaactcacagcagcacgccttaatcaaaggttttaccagcccttggacactatgggaggagggcaagagtacaccaatttgttaaaagcaagaaaccacagtgtctcttcactagtcatttagaacatggttatcatccaagactactctaccctgcaacattgaactcccaagagcaaatccacattcctcttgagttctgcagcttctgtgtaaatagggcagctgtcgtctatgccgtagaatcacatgatctgaggaccattcatggaagctgctaaatagcctagtctggggagtcttccataaagttttgcatggagcaaacaaacaggattaaactaggtttggttccttcagccctctaaaagcatagggcttagcctgcaggcttccttgggctttctctgtgtgtgtagttttgtaaacactatagcatctgttaagatccagtgtccatggaaacattcccacatgccgtgactctggactatatcagtttttggaaagcagggttcctctgcctgctaacaagcccacgtggaccagtctgaatgtctttcctttacacctatgtttttaagtagtcaaacttcaagaaacaatctaaacaagtttctgttgcatatgtgtttgtgaacttgtatttgtatttagtaggcttctatattgcatttaacttgtttttgtaactcctgattcttccttttcggatactattgatgaataaagaaattaaagtgatggttttattggtttcctttcccccaattaaggccaaataaagtcgtgagaacattacccattta

SEQ ID NO: 3904 - DNA, 1333 bp, Homo sapiens
cagagagggaccatgaattctaataatctatttgtaagagcagcaatctggaatttaatagctcactagtatggccttcagtgattagtgctatatttgttacaaacagaaagatccaaattgttggttttatatcaatcactgcaggtttgatcatcatcaccagcaatcttattaatagaatgaatagaattctcagtgatgaaaaacattttttgtgctttttacttgttgaatcataagattatcaactgaaaatctttggacctatatccattcagtgtctacttaaatacaatttacctctattttatcatgagcccctcccccagtttcctcccacgaatgttctgcctccccttgccccagcatgtctctctgtgactaaagaattcttccaatccactaataacatttcttatttctgcacatctaggatgacagtacgagccatagtgaccaccaagaccccatctcattagctgtggaaatggcagcagtcaaccacactatcttggcattggcccgacaaggagccaacgaaatcaagacagaggccctggatgatgactgatcagggaggttaaacatgacaagttaacttagtttagacgtagcaccttagcagactttcctcggtccttaacatgtgttcttacagtataacttgcagtttcttgtatgtcaggtagctgttagggtcttgttctgtgaagatggcatggtgccctcagcctttgcatatactctctcagtattaactcccagtaaataataaccaaccaaccaaccaaccaaacttccctctcccagcccccgaggctagaaaatcttgctgctccgtcttagcattccaagaaagtgcttccaggtatttagatagccctcagttctcaaatattagactacgtgtaaaatcttgggtacctttagattcttgtaacactagtctgtactcccttttccttccccaagactgataggatgcaagctgaggtcgtggcacaggaatgacagacaccatttggggagtatccacagagtcaaaggaacactagaatccccacctcagcgtgaggataattgatttccagctgcaataagccgtgcctcattatagccacactgtggctagattatacttctttgggtgctgtgctaagaatgtcaatggaaaaagccgatctcagattttgtttgaagttaacatgcctgacacagacatcctttcctctcacaagctgtgtgacttagtagataaaatactgccttctgcctttgggaccatgattaaaaacaaagacaaaaaccaaaagtcattaaaaaaaaaaaa

SEQ ID NO: 3905 - DNA, 161 bp, Homo sapiens
ctaccaaaaaagtctttcaaggatggagctaaggtcaaaaatgagtgaaaaaacttgcagtgtttgtatccattaaacggaagccccctcactctgagaggtcactagaggacttcatagtggggttgtgctgcttatcacagatgcagacacttgcccag

SEQ ID NO: 3906 - DNA, 595 bp, Homo sapiens
cgaggcaggtggatcacctgaggtcaggagttcgagaccagcctggccaacatggtgaaacccgtctctactaaaaatacaaaaattagctggatgtggtggtaggtgcctgtagtcccagctactccagaggctgagacaggacaattgcttgaacccaggaggcggaggttgcagcgagccgagaccatgccagtgcatgctagcctgggtgacagagcgagactgtctgaaaaaaaaaaaaaattccttatgtggtttgtaaaataacctaatgaaaatggaatagttttctaattacagaaagaaaagaagttgaagtgggtttcgccatgttgagcaggctggtctcgaactcctgacctcaggtgatcagctcgcctcagcctcccaaagtgctgggattacaggcatgagcacccacgcctggccaaaaatcttataaataatccccttctaatttcggccagcttaatcacacaccaaattcctttcatgagattaatcttccacaacttctacacttccttaaatctttgattttgtcctatacttctttttttatattagcaatctactttaggacagaaattta

SEQ ID NO: 3907 - DNA, 562 bp, Homo sapiens
aggcaggtggatcacctgaggtcaggagttcgagaccagcctggccaacatggtgaaaccccgtctctactaaaaatacaaaaattagctggatgtggtggtaggtgcctgtagtcccagctactccagaggctgagacaggagaattgcttgaacccaggaggcggaggttgcagcgagccgagaccatgccagtgcatgctagcctgggtgacagagcgagactgtctgaaaaaaaaaaaaattccttatgtggtttgtaaaataacctaatgaaaatggaatagttttctaattacagaaagaaaagaagttgaagtgggtttcgccatgttgagcaggctggtctcgaactcctgacctcaggtgatcagctcgcctcagcctcccaaagtgctgggattacaggcatgagccaccacgcctggccgaaaatcttataaataatccccttctaatttcggccagcttaatcacacaccaaattcctttcatgagattaatcttccacaacttctacacttccttaaatctttgattttgtcctatactttttttatat

SEQ ID NO: 3908 - DNA, 457 bp, Homo sapiens
tgcctgtagtcccagctactccagaggctgagacaggagaattgcttgaacccaggaggcggaggttgcagcgagccgagaccatgccagtgcatgctagcctgggtgacagagcgagactgtctgaaaaaaaaaaaaattccttatgtggtttgtaaaataacctaatgaaaatggaatagttttctaattacagaaagaaaagaagttgaagtgggtttcgccatgttgagcaggctggtctcgaactcctgacctcaggtgatcagctcgcctcagcctcccaaagtgctgggattacaggcatgagccaccacgcctggccgaaaatcttataaataatccccttctaatttcggccagcttaatcacacaccaaattcctttcatgagattaatcttccacaacttctacacttccttaaatctttgattttgtcctatactttttttatat

SEQ ID NO: 3909 - DNA, 113 bp, Homo sapiens
tttttttgtatttttagtagagacagggtttcaccatgttggccaggatggtctcgaactcctgacctcgtgatctgcccgccttggcctcccaaagtgctgggattacaggc

SEQ ID NO: 3910 - DNA, 101 bp, Homo sapiens
acaatctttaaataacccccaacttaaacaaaattgctcttatttaacaaaaaacttatctcaaaaaacctagcacggtcaccaagcgtgctttgcttttc

SEQ ID NO: 3911 - DNA, 101 bp, Homo sapiens; identical to SEQ ID NO: 3910

SEQ ID NO: 3912 - DNA, 3110 bp, Homo sapiens
gactttttaaacagctttatgaagatataattcacaaaccatacagttcatagggtggtgcaaccgccaacacgatctaattttaaactatgtttatgctgctacgagaaagcctatacccataagcagtcattttctattccccacccccaaacccactccttagccctaggcaaccactaatctactttctcagaccgataactttagcataggtataaatcgatcacagagcctcaaaatccacccgatgtctgggccatgatgtgaaatttggtaggtaatcgtcccacgttatcaacttgtaaagtagaaatggaagtgggggggaaaactcagccgccagtggcgtttgtgaaaagcacctggtaacaggctgtgctggaggggagttcagcccctagaaaagatcacggattaggaattacataagcataggtctcgggcccttttattttggacgcgatcctttcacgggatcgcctccggatgggagccggatgggatcccggacgggatcgtctcgctgggagccatgcgggaaaccgcaagagtcagaaacaggcgttgaaggcaggcagcattttccaaaacagctgtgtctcgggagctgccgggctgtagcgtctccccgagtcgcgcgcgcatgacgtggcgggcgcgcgatgacgcgacgcgtggcgcggtgcacgctgggatatttaagtctcctccgcggcgcggagccgcgatgtctccggcggctgcggcggctggagcaggcgagcggcggcggccgatagcgagtgtcagggccggccggggcggcgcttctcggcctgtcgctggtcggcctcctactgtacctcgtgcctgctgcggctgcgctggcctggctggccgtggggactaccgcggcctggtggggactgagccgcgagccccgaggttcgcgccccttgtcctccttcgttcagaaggcgcgacatcggcgaacactgttcgcttcgcctccggccaagtcgacagccaacggaaacctcctagagccgcggaccctgctcgaaggacctgaccctgccgaactgctcctcatgggcagttacctgggcaagcccgggccgccgcagcccgcccccgctccggagggccaggacctgcggaataggcctggccgccgcccgcccgcccggcgccgcgctccacaccgccctccccgccgacccatcgcgttcaccacttttacccctctctccccactcctcttctccgaccctccgggaggccttccccacggtgagatgcgctgattttcccagatcatcctttggctcggctggcttgaaatcgaggacttttaaatccgatttgctttttcatcaaatccgaagggaattgtgtgtggttttgccctccttaacaccttggtgtgtgccagccgtctcctggcctctgactcttgcttggtgtgagatgtgttgccaaaacgattcccttctttccagttctaaaaactccccgaattttagtgcagtctagatttagtctagatttagattttccctctcaaattgttgcaatccattgttgagacagctgttaagcagctgtcactctctgctcttagatggaataggggaaagttgccataaaaacaacgtgttctgtgttgcgtagaaagagacttaagttctttggaaaatgtcttaactggtgggtttttaaccgtctaaaattttgacattcttttatactttgtttccatgatttgtctcgcattctctgcagggatcgtgggactttaccagatcggtttgtaataacacctcgaagacgctatccgatccatcaggcccagtattcctgtccgggggtacttcccacagtgtgctggaatggttatcacaagaaggctgtgctgtcccctcgcaactccaggatggtgtgtagcccagtgactctgaggatcgcccctcctgacagaagattttcgcgttctgcgatgtgagtattatcgttggaagaatactctcccttttcgtgtccactttattcttctccagttgttcctatgacaacatgactacaacgcaaaaaagaaaggacgaatctgcttgtttgaatgagaaataccaaattctagtaaaaccgtttgtttttcactttttgccgttaacgaaaaagtagctttacttgctaaggggaactgttgtgagtgtataaattatactttggcttgttggttagcttctgatttccatttctgatatggcatgggaattaaaatatcttactgctagaatcctgtctttcattatagaccagagcagataatcagctcaacactgtcctcaccatcaagtaatgccccagacccatgtgcaaaggagactgtactgagtgccctcaaagagaagaagaagaaaaggacagtggaggaagaagaccaaatattccttgatggccaggaaaataaaagaaggtaacaggctcaggagagtactaagccagtttcccgcttggactcctatgggatgagatgtagacattcccgtaaagatacagaggccacctccagtttgtgagccttcataggcctccttctttggctttcatgaaagaacctaataacaggggttttaatgctgatcatttcaaggcacaggttagatcgatgtcataatttaccttttctgtgagtagcagagataagctgacagctattagccatgttagcctcatgcttctgtagaaacgtgttaaaagtttattttcaagaaagaaggctctaagtcttctggtcggaattttgtggtgttcagttatttgggtaaccaccagttctagtgtcttttttttttttttttttttgagttggagtctgtctctgtcccccaggctggagtgcagtggcccgatctcagctcactgcaagctcagcctcccaggttcatgccattctcctgcctcagcctcccgagtagctgggactacaggcgcccgccaccatgcccggctaatttttttgtatttttagtagagacagggtttcaccatgttggccaggatggtctcgaactcctgacctcgtgatctgcccgccttggcctcccaaagtgctgggattacag

SEQ ID NO: 3913 - DNA, 101 bp, Homo sapiens; identical to SEQ ID NO: 3910

SEQ ID NO: 3914 - DNA, 3110 bp, Homo sapiens; identical to SEQ ID NO: 3912

SEQ ID NO: 3915 - DNA, 1922 bp, Homo sapiens
cagtgagctgagatcgcaccattgcactccagcctgggtgacgagcgaaactccatcccaaaaaaaaaaaaaaaaaaaaagcttagtcagatttggggatgcagccaaacccttctgttgctgtggtttgaacatacagtctaatgagcagggagaccattagctctttctggggcagtgggacaggaaagaataccttggaccttagggctactctagttgtaatgtattagtgagttatcactagagaagttccacagtttaatattatctatacctatatctatatatctacctatatagatagatatatgttagatgcttcaacaactagggtctacacttaatatactgacatctaaggatgcggccaagaaaagctgtaattaggctgaattttattgccaaagttgttcttttttcatttagtcctttaataaaagatgatcttcataaattacagaaagtttgcttaccctgtttgaccttttgcagaaaagaacaagagggaagacagaccttcaggctgggtgcagtggctcatgcctgtgatcccagcactttgggaggccaaggtaggaggatcgcttgagcccagggattcaagaccagcttgggtaacatggtaaaaccccatctctacaaaaaacagaaaaaattagctgggcatggtgtgtgtgccttgtagatccagctacttgggaggctgaagtgggaggatcgccactgcactccagaaactaaaaaaaaaaaaaaaaaaaaccttcaaaaatatatctaagccagatgtgatggcatgggtctgcagtcccagctactcagaaggctaaggcaggaagatcgcttgagcccaagagtttgaggctgtagtatgctgtgagtgcgcctatgagtgccaactgggcaacacagtgagacctctgtctaaaaaaaaaaaaaaaatctgttgggctgggtgagctggctcacgcctgtaatcccagcactctgggaggccaaggcaggcagaccacctgaagtcgggagttcaagaccagcctgaccaacatggagaaacctcatctctactaaaaatacaaaattagctgggcgtggtggcgcatgactataatcccagctactcaggaggctgaggcagaagaatcgcttgaacccaggaggcggaggtggtggtgaaccaagatcacgccattgcactccagcctggacaacaagagcaaaactccatttcaaaaaaaaaaaaaaaatctgttaaaatttgatatagtaggcactgacaaaagaggtcaaatgcaggactgatttctaagcttgcaatctatctaaatgcagatgctaatttagagtgcataattattacacaagtacagacctaggttagggcttaaatttcattatgtgcaataaaaaggttaagtgatggttaagcaaggtgtagattatccttacctctcctaatgacatgggctcacattggcattcctttcatacttttacgtataaagtgggcagttgtttctgaatgactgttgctggagcctcaggcctgctttgtgcttggtgctttccagactttctcctttattcctatcaccatatacgtactcacaaaagagcagtgtaaaccaggtattacatttccacaagggaaagtagaaccaggaatagccacatgatacttaccgaaagcttcactttccctatagagaaagcaagcaacatgaatcttctgatttggggcccagcctgctgctgtatacagaggttggcattattggtgatagaaatgtctgataggagtcttttaattatactctggagtgtggaggtggagtgcaaggctgcttcctttattactgcaagtgttattttctattatctcaggtttcgttttgtgtaataaactgcttcttgttaaacaa

SEQ ID NO: 3916 - DNA, 1987 bp, Homo sapiens
ctgtaatcccagctacttgggaggctgaggcaggagaattgcttgaacctgggaggcagaggttgcagtgagctgagatcgcaccattgcactccagcctgggtgacgagcgaaactccatcccaaaaaaaaaaaaaaaaaaaaagcttagtcagatttggggatgcagccaaacccttctgttgctgtggtttgaacatacagtctaatgagcagggagaccattagctctttctggggcagtgggacaggaaagaataccttggaccttagggctactctagttgtaatgtattagtgagttatcactagagaagttccacagtttaatattatctatacctatatctatatatctacctatatagatagatatatgttagatgcttcaacaactagggtctacacttaatatactgacatctaaggatgcggccaagaaaagctgtaattaggctgaattttattgccaaagttgttcttttttcatttagtcctttaataaaagatgatcttcataaattacagaaagtttgcttaccctgtttgaccttttgcagaaaagaacaagagggaagacagaccttcaggctgggtgcagtggctcatgcctgtgatcccagcactttgggaggccaaggtaggaggatcgcttgagcccagggattcaagaccagcttgggtaacatggtaaaaccccatctctacaaaaaacagaaaaaattagctgggcatggtgtgtgtgccttgtagatccagctacttgggaggctgaagtgggaggatcgccactgcactccagaaactaaaaaaaaaaaaaaaaaaaaccttcaaaaatatatctaagccagatgtgatggcatgggtctgcagtcccagctactcagaaggctaaggcaggaagatcgcttgagcccaagagtttgaggctgtagtatgctgtgagtgcgcctatgagtgccaactgggcaacacagtgagacctctgtctaaaaaaaaaaaaaaaatctgttgggctgggtgagctggctcacgcctgtaatcccagcactctgggaggccaaggcaggcagaccacctgaagtcgggagttcaagaccagcctgaccaacatggagaaacctcatctctactaaaaatacaaaattagctgggcgtggtggcgcatgactataatcccagctactcaggaggctgaggcagaagaatcgcttgaacccaggaggcggaggtggtggtgaaccaagatcacgccattgcactccagcctggacaacaagagcaaaactccatttcaaaaaaaaaaaaaaaatctgttaaaatttgatatagtaggcactgacaaaagaggtcaaatgcaggactgatttctaagcttgcaatctatctaaatgcagatgctaatttagagtgcataattattacacaagtacagacctaggttagggcttaaatttcattatgtgcaataaaaaggttaagtgatggttaagcaaggtgtagattatccttacctctcctaatgacatgggctcacattggcattcctttcatacttttacgtataaagtgggcagttgtttctgaatgactgttgctggagcctcaggcctgctttgtgcttggtgctttccagactttctcctttattcctatcaccatatacgtactcacaaaagagcagtgtaaaccaggtattacatttccacaagggaaagtagaaccaggaatagccacatgatacttaccgaaagcttcactttccctatagagaaagcaagcaacatgaatcttctgatttggggcccagcctgctgctgtatacagaggttggcattattggtgatagaaatgtctgataggagtcttttaattatactctggagtgtggaggtggagtgcaaggctgcttcctttattactgcaagtgttattttctattatctcaggtttcgttttgtgtaataaactgcttcttgttaaacaa

SEQ ID NO: 3917 - DNA, 1312 bp, Homo sapiens
tttgctcatttaacaagtatttattggtactattctaggcactggggattcagcaatgaacaagatagacaacgttccttctttcatgcttacatttttaaatgggtgttagggataggtaaggccataataagacaattcagactgtgataggtgctatggagaaaacaggttgatggtggtgaggtgtgagaggtcagggaagccctctgtgacatgaactgagacttaagggaagaaaaataagcagccatgcagaaatcagtgggaagattccaaacatctgtgataagtgatttttttaacacactaaatttacaaatccaaatgttcttcctccaaagtagtcatgagctacaggcttgttttctgcttccattaccaaaaacatttcttggagcttatttggaaatgctttgagaatatgctgcacatctttggaatgagttgtgaaaatggccagaagaagtcacttgagaaacaagtctggctgggcgcggaggctcagtcatgtaaagcactttgggagggcgaggcaggaagatcgcttgaacccaggagttcgagaccagcccgggcaacatgacaaaaccccgtctctacaaaaaataattagctgggcgtggtgtcttgcacctgtgttctcagctactcaggaggcagaggcgggaggatcgtttgagttcaggagtttaaagctgcagtgagctatgaacgtgccacttgcactccagtctgggcaaccaagagagaccctatctcaaaaaaaattctgattaagcatcacaactgaaggtccaagtctgtaagactggcgagaggactgaaaaagacgatgaatgccaagtgtttaagcttcatcctaccaactgagattgttataaatgagcaaacggtatctaactagtagcagtagtagcagttgttgttgttataaaatgaaacaagtctaatttttctttgcggctttgtagtggtcctataggcagtgaaaaacgacagttctttcaggtttattaaagtaaaacacgaatctttcccaacccaacatcttaaagtctcaaattttgattcgccacccccccccccaaccccgccctatgccaatcgcccctagaccaagccggctaccaccagaacagtgtccacttaccagggccctttcctgcatgtccccggccccgtactgcccccagacttcggggcccggagcccatcaaggagaagcctcagtcggcgtacgaacccagagtctcctcctaatctgctgacaagtatgaacccgccgctgttcgaacccagcgtcgccgca

SEQ ID NO: 3918 - DNA, 1312 bp, Homo sapiens; identical to SEQ ID NO: 3917

SEQ ID NO: 3919 - DNA, 1277 bp, Homo sapiens
taacatattccattagatctaattagctatttatttcaacatctttatatcttttcacctgtactcatgaccacctttagaagtaaatggggttacaatctgctggctgaaaaataggtcataagtgatttttcttgaggttagtagcaaacataggcagaactagaattagaattctggtatctagggctgtttctttaagtcctaaggttgttaaaagcagagactctggagctagactacctgaatctaaatctcagcctttctgcttatcagccatgtcattttcttccatttgtacaaagcaggcaatactgagcaactaccttataggaataactgagttaatatctaaggggctttcagcagtacctgaaatatagtaagtgttacatatatgtttactctttttattttatttggaattgtgaactgataataattgaagcctacctgctagtggccatctctgctgccaggtgaaaagagcctgacttagaatgaagtcagcgaaggaaagcagagtggagagaaaaagagagactgagtcctgatgacatcatttatttacctagacctagctgcttgtgaatagagccctactgtgctgaatagcttctgtctgctcttttctattctgctccctgctctgtgaggtaggttcctttgctctcttgcttttggttgggttcaacaaatgggaagcaccagtgggagattagaagttgagaggaaaatgaaatgatgttatttatttccctggctcctttcctgccatgtcatcatcagttggctgtgttcctctactaaatagtaccttatcaggaatcctatctcttctgttcccaagcagttaccccagttacctcactaggtttagttcctgctccctccctttaccccttttcacttagggttggtaatagcttacagttattactagccccagtatagttcactacaacttgttgctttacctaaaccctgctcatacatttgtaaatactgtagttgttttattacactcttctcaaatgtccccacttgaaatagccttctatttcttttggggactctgataaattcacctgtttgggtgaaataatagcacatttcctgaagtatatacagtgggacacatgatgttttatgggggaaagagttcttggtgaaattagtttgctgtacattacgttgtttccctcccagggattcagaaggcaaaacatattaaaggttctgaaaagtcctgaaataaacattttgaactttattta

SEQ ID NO: 3920 - DNA, 1277 bp, Homo sapiens; identical to SEQ ID NO: 3919

SEQ ID NO: 3921 - DNA, 518 bp, Homo sapiens
agggttgttacaagttgagttgaaaacaagaaaaacttgcttttggcgccatcaaaaaggaaagccagatactttcctttctacaattgaagccatttactactttctggtagactaccatactgatatattaaaagagaaatacagagggcaatatgacaatcttttatttttctattcttttatgtaccagttgataaagaatgccaaatgctcgggagataaggaaacaggaaaacttacacattagtttttaacaacgccacttatgtctttttattttgctaacattaataaacttatatttgtgctttgttttttcttaagaaataatcatatataatgcctgtaagaccatttgaaaaaattccagtttcatatatatcacttcatatttcttgaaggaaattgtatctgggggaatttttcagagatactgttgattgaaaaacttacttcagaagttatttgctcagtgaaacctcagtttcattactacattttaatatagtgtgtta

SEQ ID NO: 3922 - DNA, 517 bp, Homo sapiens
agggttgttacaagttgagttgaaaacaagaaaaacttgcttttggcgccatcaaaaaggaaagccagatactttcctttctacaattgaagccatttactactttctggtagactaccatactgatatattaaaagagaaatacagagggcaatatgacaatcttttatttttctattcttttatgtaccagttgataaagaatgccaaatgctctggagataaggaaacaggaaaacttacacattagtttttaacaagccacttatgtctttttattttgctaacattaataaacttatatttgtgctttgttttttcttaagaaataatcatatataatgcctgtaagaccatttgaaaaaattccagtttcatatatatcacttcatatttcttgaaggaaattgtatctgggggaatttttcagagatactgttgattgaaaaacttacttcagaagttatttgctcagtgaaacctcagtttcattactacattttaatatagtgtgtta

SEQ ID NO: 3923 - DNA, 12771 bp, Homo sapiens
aaaaagaagaaacgttataaagattctctttctctagctgccatgattagaaaattccagaaagagaaggatgcattaaagaaggagtctaaccccaaagtcccagtgaccttgtcaaccccttctctgaataaacccccatgtgctgctgcagcactggggaatgacgtcccggacttaaatctgagcagcggtgatccagaccttcccatttttgttagcacaaatgaacatgagctgtttcaggaagctgaaaatgccctagagatgctagatgattttgacttcgacagattactggatgctgcttctgatggtagccccctatctgagtcggggggtgaaaatggaaccaccacccagccaacctacacttctcaggttatgcccaaagtggtacctacactcccagagggtctacctgtacttcttgaaaaacgtatcgaagaccttcgtgtagtaagtgtaataattctcttgctttttatttgctgcacaaacataagaattaatgcttttgttcgtttgtttttattttccacataacactggtataattgcttttgttttttaaagataaaaataataaactacaatctgaacatttttataactttttatttgccatgtttccttttagacctttcttttttctttctttctttcttttttttttttttttagtagagacggggtttcaccgtgttagccaggatggtctcaatctcctgaccttgtgatccgcctgccttggcctcccaaagtgctgggattacaggcgtgagccaccgcacctggtgttttattttatttatttatttatttatttattttgagacaaagccttgctccgtcgtcacacaggctggagtgcagtggcgtgctctgctcactgcaacttctgcctattaggttcaagagattctcttgcctcagcctcccaaatatctgggattacaggtgcgcaccatctcccccggctaatttttgtatgcttagtagagatggggtttccctatgttggccaggctggtcttgaattcctgacctcaagtgatctgcctgctttgacctcccaaagtgctgggattacaggtgtgacccactgcgcccagcctagaccttttctcttaaatagaaataactgactgggcatggtggcacatgcatgtaatcccagcactttgggaagccaaggtgggtgaaccacttgaggtcaggagtttgagactagcctggtcaatatggtgaaaccctgtctctactaaaaatacaaaaaaaaattaggtgggtgtggtggcgcgtgcctgtaatcccagctactcagaggctgaggcaggagaattgcttgaacctgggaggcagaggttacagtgagccgagattgcgccactgcactccatcctgggtgacagagcaagactccatctcaaaaaaaaaaaaaaaacccaaataaataaatagaaataactatagtgataacatcaatagagttggttcttttattattaaacagcgggattcacctgactccagagtaggtggcataggtttttttgttattccatgtggccccatctctacatcttagtttcttttaggattttaaaaagtgctaatgatgtaaattcaggtttttcaaggtgtaattattcataatagctatcgtttatttagcaggaaccaatcctgtgtgtaagttccttatttataagatagggactgtaacaccaacttttttggctgttacgaaggttaaacatggtgatgagcatgaagtcagacacatggtaggcagtaacgtgtatagaaaatgagacatctctttctgtctcctttctgttaccttgcaaatcacagcaagaattaataaacctatggataatcaaaatacacaagacatccgaagtatttgcctcattttgtgaatttaggaagacaaattatatgtatatatatcaaatatgaaagaagggtgtgtatgctaaatttcaacactctttaattgcctactttatgccaggtactaaattgcataccaaggatacaaagttaagtgaattatagccctaccctcaaggagcttattttttagtaaataaatatgggaacagtatcttgttttttaaactgtggattgagacttatcagttggttggaaatcacaatagtaggtaaaggccagcatttttaaaaaatgaaataaaaatggtcaggcacagtggctcacacctgtaatcccagcactttgggaggccgaggtgggcggatcacctgaggtcgggagtttgagaccagcctagccaacatggtgaaaccccatctctactaaaaatacaaaaattagccccgcgtggtggcaggcgcctgtaatcccagctaattgggaggctgaggtgggagaattgcttgaacccgggaggtggaggttgcagtgagcatgccactgcactccagcctgagcaaccaagcaagactccatctcaaaaaaaaaaaaaaaaaataggaatacgtgctaatacatcaaaagtaggttccaaaagtattgtatgacatttttgtttatatacatgtgtgactactggataactaaatctaattttctataactaggtcatataaaaagtcttaaggttataaagtttaaaattccatcagaaattcttctaggtgtttttactcaaaggaaatctattttttattcacattaggctttggtaagtactatatgcatcatgaagagattataacttaatttgcagtttgatactttttatgacctgtgatgattattgaatctaaaaatagtactaatttattattcacattactttttaaaaaatactgtttttgccttcaccaaatcatcagttaagtgaccttttaaaaaaatcgtttatttcaacagttgtactatcaattccgtattactttacttattcactacatgtttggctttttaacttcctcttagagattaccaactctactgattttttgttgttgttgactatatctatggttatttttttcccccaaaatatactgcctccagccacacatttcagctggatcattgactgtattctggtcagcgatcctcatggaatgtagctaactctattaataattatgatgtcagtgactccttaaaggacagagtcatagagtctgtcttcttggattcaagttagatatgacaccagattcttttgtctgctcgtagaagtctgcaacttcaatgtgggggttgatcacacgatttggacctcttttttttgacctacactatttttgtttgtttgttttgaaatggagtcttgctctgtccccaggttggagtgcagtggtacaatctcagctcactgcaacctccacctccctgcaacctccgcctcccgggttcaagcaattctcctgcctcagcctcccaggtagctgggactagaaggtgcatgccaccacacccagctaatttttgtatttttagtagagacggggtttcaccatgttcgttaggatgtcttggtctcttgacctcatgatccacccgcttggcctgccaaagtgctgggattacaagtgtgagccaccatgcctggcctacactattttttaattaatacatataagatgtagatatttttggggtacatgtcataatttgatacattcatatgatcaaatcatggtaattgggttagccatcaccttaaatatttatctttataccaggaacatttgaattattgtcttctagctattttgaaatgtgccatcaattatttttaactgtagctaccctactgtgacctatactatttctaaatatctttgtatttgattctaaagactcttaatcttgatgggaattgatttttttgttttttcatgttcttaggatcacaacttttacagatttttaaaatattggccgggcgcagtggcccacacctgtaatcccagcactttgggaggctgaggcaggagatcaagaccatcctggctaacacgatgaaatcccgtctctactgaaaatacacaaaattagccaggcgtggtgacacacacctgtagtcccagctacttgggaggctgaggcaggaggatcacctaaacccgggaggtggagattgcagtaagccgagatcgcgccactgcactccagcctgggcgacagagtaagactccgtctcaaaaaaaaagaaatttctgtattaagccttacaaaagatatccatattctaatccttggaatctgcgaatgttattttatatggcaaaagaagggtggaatctgtgtgtgtgtgattaagttaaggatcttgagatggggttgttatcctagattagcctatggcccataaatgcaatcacttgtatgcttagaagagggaggcagaaggaggtgttttacacacacaggagaaggtaatgtgaagggagagcctagagggatttgaggttggaatgctgcggctgtgtccaaagaatgctggcagccaccagaagctggaagaggcaaggaacaaggtcttccctagagcctctggagggaccatgggcctgctgacaccttcatttcagcccggtgatattgactttggactttggactgaggaaggataaatttctcttttttcaagccaaaaagtttgtggtagtttgctataatagctgcaggaaacttacacaatacccagctgaatttgaatctctcaaatggctttgcctctctgttcatcacaactcatttggtgttctactgttaggagattctttttttttttttcattagatgttcatctcaaagtaattgtttattgcagcagggcacagtggtacatacctgtaatcccagctacttgggaagctgtaaggtgggaggattgcttgagcccagaagtttgataccaacctgggcaacatagagaggccctatctcaaaaaaaaaaaaaaaaaaagaaaaaaacctttgaacacgtgtcctaagaatgcaaaatagagtaatggcctattttgatttattatcatctttcttgtttctttaggctgccaaactttttgatgaagaaggaaggaaaaaattctttacacaggatatgaataatattcttctggagtaagtaattttctttaaaaaaaaaaaccttaagaatgatacattaaaaaatgtaataggcctttgagatactgagtggttggcaagtcttgggcatgagttcttccccttaagccttacagcatgtatgattcacatttgtttctcagcaaaattatctttctgtatatattggttttcctggaccacttaggataatcaaagcttccaatagttacaactgccagagcaagtgacgactatgcaggttggatattaagctagacttaacgtacttcataccaccttatatgaaagtatctttctgggaaatgttagagcgtttatatacagatttggcatgattttccatctacttttattacttacactggggaatagtaattccgttgatatctagtgaggttgattataatttgtacaaacttttatagtcaaatggaaagtacagttttataaagaaattgtggttgtgaggtaggatagagataatgtagaggagatagcagttagattgagaataagaaggtgaaggtagatatataatatagattgtatttaaattagcaaattttatatttaacttagcaataattttgcactcagagtttgatactaatgaagctgtaggttctaaggttgtggtcaaataaactgaacttataaaccttgtccttgacttagattttaaccattgtttacaagaatcaggtatataattggatgcagaactgggcaaaaaagtaatcatgaggaaaatagcaaattttagccctctctggtgaaaataatgtttgcttattcttagtggcttagtagcatcatgtattatagaaagacacgggaaaggtcaggcatggtggctcatgcctgtaatcccaacactttgggaggccaaggtgggaggatcacttgagctgaggaatttgagatcagcttggggaacatagtgaaactccatttctataaaatatacagaaaaattagccaggtgtggtagtgcacacctatcatgtcggctactcaggaggctgagttgggaggattcattaagcctgggagattgagcctgcagtgaactgtgttcatgccactgtaccccaacctgggtgatagggtgagactctgtctccaaaaaaaaaaaaagagagaaagagagaaggaaaagggaaataaaaggaaaaggaaagtaatatttataatactatgatttccatcttttaaatacataatggagacagtttctcatgagatgtgaagaagggctgattgatcattgcttctgataatgtttgtaatttattactgtctattattttggagtgcttaaaaatagactcagaaaatgtataacttagtctgccgctagtatggtggcagaggagtttctcatttctgttcctagttactttaaccaggaattttcagatggagtcttttctgcgtggcagccaggcaactgctttctatctacaccacctccttttacctagctccctttaaaaccccggactcagtgaacagtgcagccattacttgtcagagctgtcccagattccatagtcagggatctgaccaactcttctttttctttccacctgggaacccgaagtgtgatcaggtccttctcttgtgactgaggctgttcttttttattttgctcttctgtaaaagggaacaactgtttctctccggggagagtcaaaagaccatccttgggacatagcatctcagataagcagagtatcagcattccattaacaggctttcctgtttattcctctcatgtctatcttaaaacgaatcttcccattttttggagcccatctgctttttatttcacagagggtatgcctccagtttcacaagtactagtgttctgagttgaattttttttttcccttttagtcactttcttattccctcagcctctttttccgctttcctaaacaaacatgtcttattttctgtattgagttgcccttctaagagaatatggaacatgattatttagagtaggaactcccatgaagctatccagttgtattggtgatgccttgccattgcttccttatactagggaaaaaagagatcaatttgttggaatagggaaccccccctttttttcctgattgaatttgacccggatcaataaatatacaacatgctgatgatttccttgcctactacctagagcagacgttgctcataaatgtttttttcttttttctcttttgagacagggtgtcactctgttgcccagcctggagcagtgatgtgctcatggctcactggccttgacctgccgggcaattgccagtgggccgaggggtagtataatatctctttgaggaaaggagcttttggttaattacaaatttattgtgctttacccaaaaccatagagtttgcccctgtaacccaaaaaatatttccagcttgttcatggttattgaagttctactcttaaactagattgatagaatacttttatagcattactatttattggtatggggctgggcgcagtggctcacacctgtaatcccacactttgggatcaaaggccaaggcgggtggatcatctgaggtcaggagttcgagaccagcctgaccaacatggtgaaaccccatctctactaaaaatacaaaaaacttagctgggcatggtggcgggtgcctgtaatcctggctacctgggaggctgaggtaggagaatcacttgaacccaggaggtggaggttccagtaagccgagactgcaccattgcactccaacctgggctacaagaacaaaactctgtctctaaataaataaataaataaactgtttattgctatgggtttttttttattttttccatgaagaatactgtttaggaaatcatgaaaagataaaatgagaacaagaactggctttgctttcttgtctgtgcaatgccacctaaaataaattctatactgttcattgttgttaacttttttggccagcattgagttacagctacaagaactaggccctgtcattcgcagtggtgtctactcccaccttgaagcttttgtgccatgcaataaagaaacactagtaaaacgtctgaagaagttacatctcaatgtccaggtaagaggaagaacaataatatctacatcttgggtttcataacctgtaaagatacttgtttctgtttggggcctttgcacattaattgatttatagtcatattgtatgtatttaataaccataggaggttattaaaagtatgttggatcccctgaaaaataattgcgtcttcaacaattgttaagtttagatgagaaatgttttctacggcatagattgttggatgtaagttaatatagtaggtatgctctgacaaacagtattttttaatataagtactcacctttttttttttccttttgatacggggtcttgccccgttgcccaggctggagtgccgtggcgtgaacatggctctcactgcagccttaacctcctgggctcgagcagtcctcccacctcagcctcccaagtagctaggactgcaggctggcatcattaccctggccattttttaatttttttctgtagggacagggtctcactgtgttgccgaggctggtcttgaatccctggcatgtttgaagttatttaatatccctttggctatggaagaaagatatcttatccttacttttctttatatggttttatcacatatatttgtatccctaaacattatatttagttttgcatatttttgagcttcatatatataaagaaatactgtctgctttcttctgcagcttgtaatgctcaatattgtgcacctgagattcatcttatgtctacatatagcagaaatactttttttttttttttttttgtgacagagtctcgctcagcccaggctggagtgcagtggcgcgatctcagctcactgcaaccaccatctcccaggttcaagcaattctcctgtctcagcctcccgagtagctgtgattacaggcacccgccatcatgcccagctagtttcctattttagtaaagatggggtttctccatgttggccaggctggggtcttgatctcctgacctcaggtgatccgcccagcttggcctcccaaagtgctaggattacaggcgtgagccaccgtgcctggccagaaacacattcattttttactgctgggtacacagtgttccattgtgtgaatatatcccaattaatttgtccattttactacttatggatatttgggttgtttccaggcaggtagcctaagctaaataattcttcaaaagtaatcatctaggaaccatgataccagatgttcactttttaattttttttttttgagacagagtttcactcctgttgcccaggctggagtgcagtggcacgatctcggctcaccacaacctccacctcctgggttcaagtgactatcctgcctcagcctcctgagtagctgggattacaggcatgtgccaccacgcccagataattttgtatttttagtagagacgggatttctccatgtttagtagagacagggttggtagagacagggttctccattctccaggctggtctcgaactcccgacctcaggtgatctgcctgccttggcctcctaaagtactgggattacaggcgtgagccactgcgcctggccagatgttcacatttttaaacataggattttgtcatatgtgctataatatttatttactggtgttcgtggaataggttaatatacacatttttaaacatgggattttatgttatatgtgctgtaatatttactggtgttcatggaataggttaatatgcttatttgtaatatttgtgttttaaaaatctttttctttaccaaaaatcacattttaaaaacagttgttttggctgagtggctcacgcctgtaatccgagcactttgggaggccgaggcaggcagatcacttgaggccaggagttcgagaccagcctggccaacatggcaaaaccctgtcctactaaaaatagaaatatttgttgggtgtggtggcacacacctgtagtcccagctactcgggtggctgaggcacgataatcacttgaacccagaaggcggaggttgcagtgagccaagatggtgccactgcactccagcctgtgtgacagcgagactctgtctccaaaaaaaaaaaaaaaattgtttcagtaaagaaaagtcttataatatttctgcacctatgatggtgataaaagtatgttttaagtagttacatatatacttgtaagatgcttgtaagatgaaagtaataaattggttgattaaaactgtcagatgcaaacctactttcttttttgccctgaaaacgcacatgaataagagtttttgggttcctttcactttggccttgaccttgcatttttacttgcagcctaagtcaaaattactaaccataactgagagaacaggataccaacgtccggttggtagtcacccaaaccaaacacgtgtcttcgtgttccagagcagtgtctattcttagggtactggtttcccatcacaatggaaattaaccagtagtagtctatacaagtagaatacaatgattttgttttccgttttctgtatgaaagtgttcacggggcattttgaagagtgtaatggaacactattaataattatgctgggcgacagggaaaaactggaactcttcttggctaactggaatatgtcattctaattttgtatccagtgtgtcttaggaaaagtcagtgctgtagaagaaatgtccatatttagatatgctaatatttcaaatctataattggtatctaaaacataaattttatcttttgaggacctgcttacaagatttcgtaaatatgtctgataaaaacttctagtatgtttttctttttaggatgatcgtttaagagaacctctgcaaaaactgaaactggctgttagcaatgtcatgcctgaacagctatttaaataccaggaggactgccaggctcgtagtcaagctaagtgtgccaagtatgtatctcttctatttggactggcttttgcatttgagaagtgtatgtacgttatgtatgtatgtatgtatgtatgtatgtatgtatgtatgtatgtattttgagacggaatctcagtctgttgcccaggctggagtggaatggtacgatttcggctcagtacaacctccgcctcccgggttcaagccattctcctgcctcagcctcacaagtagctgggattacagacacgtgccaccacaccaggctaatttttgtatttttagtagagacagggtttcaccatgttgaccaggctggtctcaaactcctgacctcaggtgatccagctgcctcagcctcccaaagtgctgggattacaggcgtgggccactgcacctggacgtgcatttgagaagtacttttagctgttctgatgttaagtggacctcattctcaagtagaaatccacatatactgctgacttgatataattgagtattttgtaaatggcactcagttgctttgcagtcagagacaaaaggtgtctgttgattgattgtatggaggtgatcaagcaagagctgacactggtgagagatttcacaaccccagcttgactgactgtggttgaacacaagtgttttctgacctaaaaggtgaatgttggtgcctttacattataatctgaagtccttatttaccaaactactttataactcctttcaaatttgaagtattatgtggaaaggtagattccgtctttaccctctcttttaacattccattaagcaattcagcaagtatttatggagcatattatataggcagtgttgggttaaaagtttgttttgtaaagtgtttttcatttttagattgcagacagatgaagaacgagaaaaaaatggatctgaagaggatgatgatgagaaaccaggaaaacgtgtcataggaccaagaaagaaattccactgggatgacactatcaggtaagatttaattagttttcacttttaatatataatgcagaagtaagattcctcattaaaaaaaaatctataataaatataaaactagattggaagcaaccaaagattagtgtgtaggaaaaaattattcaagagaagattaattgggctctaatatcctcagagtattattgcttttattttcatatacactgtaatactttttacaaactaatctaataatggtgtaagtcatactggtttcagaaggtgaagtactttcaacatatttcttctttagccatctttctcaatagtatttctataccccaagtagagaaccatccctttcaatctttggtgctttgattaaagatatcaaaggaaattgtttcatattgcaggtttgactgtggtgcaatgaatgatatatgttagaaattgtttgttattttctgaatttttcacataatctgtattattgctgccaaatgtatgttcttctaaaaaaagtttcaaatttaattttcaatctgtttagaactttgttatgtaaccttgttgagatcaaattgggatgctatgagttagaaccaaataaaagccagtctgctgaagattatcttaagtcttttatggagacagaagtgaagcccctgtggc

SEQ ID NO: 3924 - DNA, 122 bp, Homo sapiens
ggatcacctgaggtcgggagttcaagaccagcctgaccaacatgaagaaaccttgtctctactaaaaatacaaaattagccaggcgtggtggcgcatgcctgttatcccagctactagggag

SEQ ID NO: 3925 - DNA, 860 bp, Homo sapiens
aggttcctatggctgtctctaccttcaagaggcttagctttagtcactgagaaagacaaggaaactaatgatagaatatagtagcttcttctggcgttaggtatcacagagtcacagctagttacagctagccctttattattgaaagaagaggagctagcagtcccactatcagaattaagactagagatggtaataggagctagtatcagaaaagcttaaggcaaagcataaagtgtaggctagaatgaagctggagaatggggagggggcttgggtaacatccagaacctggctggggacctggaactacatgagatgtaagaatggagaggttctagcagtcagaggtcaggtacaaatgaacagctgggatctgcgcatggcagacagtgaaaaaacccaggcaagcaaaatggtcagagcagaaaggggcccaaggccacgttcttgagatgtggagggggctgaggaagccacgccaagtaaggacagatgcagctcagcagttcctagcgagccctgacaagccagctcagctgaagcttcgggtgggagccagtcatggcacagtggagtgaaggaagagcagtttcaggcacccaaaacctgacccccacgacctgttttccacctgaagagccacccattccatccaaacccttggcaaaagtctgctaacagagagaaccggccagtatgctggccagtcgcgatcatgcctgtctttaccctctaagctgaagctgctcatcaacggtgagatggcaaaaaggtgggtccagaagaggggaaaagaagggagtctgtgaaaacaaaatgctgaagaatctgcatcaaataaacccttccttccttcc

SEQ ID NO: 3926 - DNA, 860 bp, Homo sapiens
aggttcctatggctgtctctaccttcaagaggcttagctttagtcactgagaaagacaaggaaactaatgatagaatatagtagcttcttctggcgttaggtatcacagagtcacagctagttacagctagccctttattattgaaagaagaggagctagcagtcccactatcagaattaagactagagatggtaataggagctagtatcagaaaagcttaaggcaaagcataaagtgtaggctagaatgaagctggagaatggggagggggcttgggtaacatccagaacctggctggggacctggaactacatgagatgtaagaatggagaggttctagcagtcagaggtcaggtacaaatgaacagctgggatctgcgcatggcagacagtgaaaaaacccaggcaagcaaaatggtcagagcagaaaggggcccaaggccacgttcttgagatgtggagggggctgaggaagccacgccaagtaaggacagatgcagctcagcagttcctagcgagccctgacaagccagctcagctgaagcttcgggtgggagccagtcatggcacagtggagtgaaggaagagcagtttcaggcacccaaaacctgacccccacgacctgttttccacctgaagagccacccattccatccaaacccttggcaaaagtctgctaacagagagaaccggccagtgtgctggccagtcgcgatcatgcctgtctttaccctctaagctgaagctgctcatcaacggtgagatggcaaaaaggtgggtccagaagaggggaaaagaagggagtctgtgaaaacaaaatgctgaagaatctgcatcaaataaacccttccttccttcc

SEQ ID NO: 3927 - DNA, 1091 bp, Homo sapiens
gccagctggtaatgtttattgcaactggggtgctatacaattagtaagatgatgcaatgagaatttctacttttgtatttcctgaccagcctgctcaaagtggcttttatatcaattgaatgattttcctcattttttaatacaggaaaccaattcgtgctcatggaagaaaagttcctttgccagcagccttgaagtgaatcttacaggagcaatgaaagtattgcattcattagcgtctgccccagagaaggttcagagaaaaccttcacttgttttcaaggggatccttgtagatttacgtaattggaatcctgaagaacaggccctactgtctaaaaaatggcttttattcttctaaatacatataaacggatgttttatagatgggaagacatgaccttagaaaggagagagttttcagaggatttgccaggctgtcaggggctctgcctccaggcccagtgtggcagtgtggcctcagggcctccgcctccctgcttgagggctgcatggaggccaactgtcctgggagttgtaaaaatcttttaaggccagaccaatttgagggattttaaaaagtgtctcagtgcctcttatgatttcagaaggttttgctatatgtaatcccaactactgttttcttgagagtagcagaggattagaaaaagtcctccataaattatgtaaccggccttcctgactagcctgactcaagcaatgtaagagataattattctgttttcataatttataagtgtgggggcatgcctcagcataaaaacaacctattagggaaaaatatctaatagattacctttatcgcctgttagggttttatgttgtttttaactcagatgccataagaacaaagatacatgtaatttataatagtaatcattaatacctatattgtgctttaaggtttacaaaataatttttctcatactttatcttagtttagtttcttgacagtccatgaggtaaggtggtagctttatcaccattttacaaagtgggaaacgaaggttcctcttaggaacctagttgtcacctttgtataataaaacttcgaagctcggagctgttaa

SEQ ID NO: 3928 - DNA, 589 bp, Homo sapiens
tcttcagcatagtatttaatatacatatcaggcaatcaccatctcaagcatgattagactcaagtgctgccctccatcgtgtgagggatgctgggagactggaagcttagactttagctctttaagttggtgcaaaagcaattgcagtttttactattaataataataattgcctagccattgtgcagtaccttgcaagagctctttggcaaatgaaagaataattcaaagcaaagtaggccagatataaaacacttccaaatcacatttcaaaattgttctttcatgtcaactaggtgcatgtctgctaagggagtttttgcaaggacaggtggatagtgtgaggcctttacaataatcacatcaccatctggtactatctgtatggcagagcagttctgatgtagttgtagtattatagatcattacagagtatgccagtcattccatgatggaactgtgactggcagccttcattagcccaaagactgatgcaacagattgctttgagaaatagttttgaagcacatccatgaaacatatgatcctatgggttccagcattgatttctttgaggtatcattttaca

SEQ ID NO: 3929 - DNA, 802 bp, Homo sapiens
acctctttttcatattagttaactgcagaattttatttttatgtatttattatccttccaaacccagtgttgtaggaagaatattacatataaatgataacttaggaatcttgtcaagtttttgtttcttcagcactatgtagcttattttctaggcaggtcttaattctaaatgtaacatgcttgaaaaaaacactattgaaaggatccgtctcttcagcatagtatttaatatacatatcaggcaatcaccatctcaagcatgattagactcaagtgctgccctccatcgtgtgagggatgctgggagactggaagcttagactttagctctttaagttggtgcaaaagcaattgcagtttttactattaataataataattgcctagccattgtgcagtaccttgcaagagctctttggcaaatgaaagaataattcaaagcaaagtaggccagatataaaacacttccaaatcacatttcaaaattgttctttcatgtcaactaggtgcatgtctgctaagggagtttttgcaaggacaggtggatagtgtgaggcctttacaataatcacatcaccatctggtactatctgtatggcagagcagttctgatgtagttgtagtattatagatcattacagagtatgccagtcattccatgatggaactgtgactggcagccttcattagcccaaagactgatgcaacagattgctttgagaaatagttttgaagcacatccatgaaacatatgatcctatgggttccagcattgatttctttgaggtatcattttaca

SEQ ID NO: 3930 - DNA, 1090 bp, Homo sapiens
gccagctggtaatgtttattgcaactggggtgctatacaattagtaagatgatgcaatgagaatttctacttttgtatttcctgaccagcctgctcaaagtggcttttatatcaattgaatgattttcctcattttttaatacaggaaaccaattcgtgctcatggaagaaaagttcctttgccagcagccttgaagtgaatcttacaggagcaatgaaagtattgcattcattagcgtctgccccagagaaggttcagagaaaacttcacttgttttcaaggggatccttgtagatttacgtaattggaatcctgaagaacaggccctactgtctaaaaaatggcttttattcttctaaatacatataaacggatgttttatagatgggaagacatgaccttagaaaggagagagttttcagaggatttgccaggctgtcaggggctctgcctccaggcccagtgtggcagtgtggcctcagggcctccgcctccctgcttgagggctgcatggaggccaactgtcctgggagttgtaaaaatcttttaaggccagaccaatttgagggattttaaaaagtgtctcagtgcctcttatgatttcagaaggttttgctatatgtaatcccaactactgttttcttgagagtagcagaggattagaaaaagtcctccataaattatgtaaccggccttcctgactagcctgactcaagcaatgtaagagataattattctgttttcataatttataagtgtgggggcatgcctcagcataaaaacaacctattagggaaaaacatctaatagattacctttatcgcctgttagggttttatgttgtttttaactcagatgccataagaacaaagatacatgtaatttataatagtaatcattaatacctatattgtgctttaaggtttacaaaataatttttctcatactttatcttagtttagtttcttgacagtccatgaggtaaggtggtagctttatcaccattttacaaagtgggaaacgaaggttcctcttaggaacctagttgtcacctttgtataataaaacttcgaagctcggagctgttaa

SEQ ID NO: 3931 - DNA, 1411 bp, Homo sapiens
ctaagcacttagattttggagatacaaagaggagtgatacaaacctagctctttccccaggaagctgccttgataactagttttcaattggtttctgattgaaagttttcagtttcattgattttagaatttaacttcagaatatgacatctgaccttccatatcttagaaacctgttattccttttttttaagtctctgcattgtctttgatgccttggtagcatgcactgaaaattaactcttctgtttgaagctgtaattgtcaagattaaagattaactttttatctttgagttcactttagcattgatctcttagtgacagtgcccttgatgaaaaacagataaggggggcacaagcttataaacgtcaagtgaaagtaaatgctgcagaactcatgttgtttttttaaccaacattctttgcttttggatgtttaattcactggagagcataaatcagatctaaattaagaataacttatttagcaatgctgttgctcaccttggggttgagcagtgcattgtggtgtttcagcagttattaatctagttaaatgtagttttgaaatgttagatggtagctttgcatgaaaggaattctagcaatctatcaagtatatattctgaaaacacaagttgtttaaaatgtaggattatttgtggttgtgaaagatgaaggaagttatagcaagataatgtcagatagcatttagggaaagcacagttttaataactgattaagaaacagctactacattgattatatcaattatagtcatgtcataaagcttatgttttcagaagaatagaaacttcaagtagaatatcagattttaaaaagcattttattatgtattatgaaatatttcaaacataaaaagatgtaaagactatctaccaatgactccccccttaataaaacaaattaacctgaaggctgttttgtgcccctccttgattgtgcattcacctcccaacccctcgctccttgggcaactgttatctttgttatttgtcattgccttaacattagatttttttattactgcttttgtaattctaatgatatcaaatggaaaaaatattttgaatgcaactcctcttttaatttgctccaattttatctgtattttttagtccatgcctgtattataagtattataaatactatctgtatatacttttgctaaagtcgtgtgtatttgttaaactgatgatacagcttcataagattttaggtcagctaatggattgtcaatattttgtttagaatacttaccaggttataaattacaatttgaaacatagatatcctatagtttgagaatttgaacatagatatggattatgttgaaatcgactgcctttttcttagctatgacagtaataaactatataacaacagca

SEQ ID NO: 3932 - DNA, 1411 bp, Homo sapiens; identical to SEQ ID NO: 3931

SEQ ID NO: 3933 - DNA, 32220 bp, Homo sapiens
  SITE (9867): n equals a,t,g, or c
tgaggagataaagaaggggagagcagtctaaggtcaaacagtgtttgtccccttttataaattcacaatgtgtaatagcatgttcaaaactcttagaagtcctacagtaaggaaacaaactcagcattccttcattttaattgaccatgcaatcccccacccccaacacacacacactttttttcttacatctattaacatctcttggaactactgctatatggaacacattttgccaaaagctgctcaaccatgaagaaaaggaaagagaagtagaacaacggactgacagaaaaaaaagaactctattctattctgaattctgttactaactggctgtatgtgtatgtcagacaagccacttaaacctatgaatttgggtctttctctagaaagtgacaggaccacctaattttagaagtcccattctagcacagaatttctgactctagtagacagaacaacttgatttataattctcttaaactatcaaaaataaccaaacagtggctgcagacagcatgtgtgtttttttttttttttttttttgcaggttcccaataatcggtaagttaataaaatgaatatattttgatggcagaatgttgaaagacaagaaactaataaaaagtacttgtttttagctggaactagcatttggaagtaatgctagccagaggctatttccactgtgaaatgcacactcaaagtcctattgtaatattattttaagggtcttaggaggcccctcagaggagactgcaaggtcagggctagagtatgagaagtcctaagggtttttgtattttgtttttttttcctataaaccctgaggttgaaagctctggatagctcacctaaattactttcctctaatctaacccctcacagcctgaatttctgagtattgcttgaccagtagtgacacattcctgaggcactaatataacccaaatggaaactacaggtcctaggaaatccagataggtcacaatgggttcatgtgaagatcaaggtgagccagaagatctcatctgcaagccatttagcagccctttaactgtaaaaagcagttccactttcaaaggctacagagtttgtttacatacaaggtctccatgtaacatgttggatttcttcccactgtcatgggccaacccacactagactcagaagtcaagggaaagctctgccagctaaacacttcttatcaaagagggtgtgaagaaaccttgcaattttaacaataactaagaccagcatgtaaggtggtcttacagagatcacttgcaggaacagatattgataggaacttcagaactcaaacagcactcacataacatggaatttatgctgaaaatcccatgccttctctctcagaaaagagaggagcatacctgtgtggagagcttgtattttctcccctcccatccattcggtttacaactgaatagcgaatgtgaacttgaaactaatctttaataaatctataaaatgcaagatattatgaccaagttctgtactccgtttttactgaaatgacttctacttcatcaacgtacggtctgttcctgaagaaacttcctctttctgggtcaaattctgactgagaatgtaaaggtaggttatctttgagacttgagcttaaaactcctaccttttcataccacttgatctctgttgccctgtgaaaattctgtaaaccttcctcattgcatctgaggaatcatgctggaatgcttctttctggctcggagggttccaagacctccccagctagtggaccttcctagtccttatgccgttgctgtagcaatggggcaggtcaagtttcctgatcatagctgtgaagcactctggggcacctctgctcctggtatttcagggtgatattacatcactgctgctaattttggtagctctaaagtattctcttaaagacctctaagaacctgatatttatgctaataattacccagcaagaaacattagctgtagttttttgcaatatcactttatacagctaaaatcactttgtatatgtatagtaactcattgtatatatttgtctcttatgaatatgtgctaattacatctataaatcaaccagtatataattaacaaaaacaaatgattttttagccttttaatgcaaaaaatttaaatttagtattacatatgatctggctaagagcaagaggccttcttatgagtgatctccatcaccctgtacagtgcctggcacagaatctagagtttagccaactctcaacaaatgttttagtgaatgaatgaatgattgactaaagaaaaacatgagttacttagtgaccaaatctaatactcagtggaatagctgattataatcgctaaaatattcataatagaaataaagagatctgtatgcagtctactccatatagtcaaaagatctcatggtagccttttctaaatgaaatttttcttaagtagtgtaagaataaatttaaactaattataattatcagtgacttcttagggagatgttttaggaaaaattattaatatttctacctttaaatactttccaaaaaggaaatcttcaacgcttaagaactaccccccaacacttttttttttccttgggacagtgtctcactctctcacccaggctggagtgcagtggcgccatcttggctcactgcagcctcgacctcctggactcaggtgatcctcatacatcagcctcctgagtagctcagactatagccacaccaccgtgcccagctaatttttttttttttttttttttttttgtagagatggggttttgccatgttgcctaggctgatctcaaatccctgggctcaagcaatccacccacctcagccttccaaagtgctgggattacagatgtgagccaccacctacagcctggccaagaacccttttctctcccacattcccctgggagcagaggataggcctgatgattgttttaaacagtagaaagggttcagctaagaactacagtccactctcagccctgtcatgtactataggacaagtcttcattcacaacaaatggatagcaacaccaatctcgtaacactgggaaaactgcatacaatatttagaaggaacactaatacagcagaatctgcacacaacggagtcaaagatctgaggccaaatcctactacactttacgactttgagttggtcacttttctgaaccttagcttctccatcagtgtaaaactgatgtaaaataatataaagctatatgaaagctgatgtgatgtacttgtgaaatagtatgtgcaaaaggactttgtaaaatgtaaagcactatgctggttattgtgatatctgagatatttttaaagttgcaattcaattcaacaagcattcatttagagtcatgtgcaaggcactgtgctaagagatgggaaaatactacataaatacaaaattctgctgaaaactaacttattggcagagttccaaataatgaaacggatacatttaacaaatcagagtattgctacacctgagatttttcacttcaaccacctggaaggagaaaacctaataacagcatgaattttatcatactgttaccattcatagcagcttaataagtatttcacttcaacgtggtcagccaagttttataatttggcaatagtgtaaagaagcgtgaagagaaaaggaagaggaggaagagcttcagtctttgtatctcccagggttataatataaaactgaacatcaaataagccaccccacccttatacttatgatttattatttcttaaagagcgtataatacattgtgggagaagggtagaagattcatttttcctgctcactcaactacacactcaaaagtgaaagccctcttccttgaaaagtgactgtcttagaaaagtttaacaatacatttcttaaaccaggaaaaaattacaccatctattcttttaacagcaggtagtttagagttcttaaaataactttataaatatataatatagtaacatagataaccaaagtggaaaaatttcaagccagggtaccagtgtataaaatgaaacttttcaagccatcttaacaacagttaagtgagcaaaccaccaactctgaactctcaagctgtgttttaaaatacaaagcagcccgcagcaagttctctcttgtccaggcattctgtatgtaaggccaggaggcttctgcttctttcctgggttttgcttgctaggcacagctggaagggcagagggccacagctgagctgaactcgctgtcaaatttgaacttcctagaaaaatcactgcagaggaaaccacatcaacctactgaagatttcagatcttcagaaatgtcacggaaagtcctaaaagaaaaaaagacggaatgattagttgattaccataaaacagtatcctatttttacaatcttttggagccctaatgagattatatagtcactattttttcttaagattttcattgagtattgtttcaaagtctgctagttgttgctcattctcattaacaagaactccatctttttgctggatctatccaaaggactgtttccccagactcccctgaaactacacatgaccacgtgactacgctttggttaatgagatttaagtagaagtgttgtgcaacttctgggcagttccttaaaagagaagagcaatcttcttcagctcttccaccttgttactggctggaagtggatatgatgattgatgttaaagaggaaaaaccactaagagaccaaagattaaatgctaagtggatacattttattacaaaatagaaatcgtaatccaacagagagtccaagctctaagggatgtggttcagtgcaggaaaaatgggttaggtcttttcatcaagtgaccttgtacttgaactgtttctgacccacattaaacaagctaagcgaacaatgttattggcgggtaatatctgggctggatgaaggtggctgagcaccgtgcctgactgctgcatacatgaagtgtctatctcagtactgtagtagctagcttgcttttgctacataatttacatgtctgagctgagataaatcacctggctaaatttacatctgtgctggcagccaaatggccaggtcagaatttatcaatgaacatgagctcaagcacccatattagacaaaaatgcctcacaccaaggctggcagtacatcaggatggagagaggctgggaccagatgtttatgcaacagtgatacagatataaagcacagtctattaccattcttttagatagaagttatattgctcctttacaataagtccacatattagaaatacagaaaaatatttgactttacagttggttttttgtttgtttgtttgttttgttttgttttgttttttgagacaaggtctcactctgttgcccaggctggagtatactggtgctatctcagctcactgcaacctctgcctcccaggctcaagccatcctcccacctcagcctcctgagtagctgggactacagggaacatgacaccacatccggctaatttttatacttttgggaggctaaggtgggaggatcacctgagcccaagaggttgaggctgcagtgagcctaggtcatgccactccaggccagcctgggcaacaaaatgagaccctgcaccaccaccaccacccccccaaaaaaagcaaggaagggagggaggaagggaaggaggaataaattgaagtacaatataaagtaagtgttccaaaacctaaggaacagctcacagtagtagaaactaaagataacaaaaagcttttattaggtacaatcacctaaaaactcataaaataaacaatctgaacttcaaatgtaattccacaatcatgccccctcccttactccttttctctcctctcaattcatataaatatttaggaggcccataggcaaggcagagatcaattaaagactaaccttgcagcactcaatgaggaaagtacttcagtgtcaagaggggaacaggtaaaatgtcacagaaaagaaattacctttaaggatgttcagttatctcaaggctctttcaaggatggtgccctaagcctctggatctctgaagcacgcctctactagcacagctctactttgaaaaactgttagtctcctggctatggctcctgaggctttgagagggtttatgtgtgacatgaatacaccaaccatttttaaagatgctggctgatctaataattgaaatgaattttctttccttaaagacttttatgttctgaaaacaagtccaaaggtgaagatttgtatacgcacatgtatgtttatatgcattatctatctatctatctatctatctatctatctatctatctcaaatcagtgtttctcaatcttgaaatttttctgcattataagatgttttgcagcatccccggcctctattcaactagaatgccaatcaaaatgactccagacatgagaaattgtctggggagaaaaaaatcacccccacactcctgtcagaactaaagctctagatagctatttttcacagtctcacccaagtttgtgtttttacatttgtctacaggccaagctggctgctgtctcagacaatatgaatttcaggtagcacttaattctgaaaagccctggaaaatctttgcaagcaatagtcaaaaactggctaatactacaaagcattttctaatacccaacggggttccctgacatcttttcaaatttctcagatacctgtaattttatatctattaactattcatttcctctaaattatgaatgaagatttcagcctcagggcaaagacacattaaataagattaaggctatggttagcctagtcactgctctctgttgacaagtgagcttagctgtaaccttgaaattcctaactactattcaattttgtctccaggccaagaaagtctccaaaaggactcaggaaaacaaacaaacaaaacaaagaaaaccaacaacctgaagcaagcttagagatcagttactaagagtctttcatctcaatgttctctctaggtatgtagggtgttagggtgattgatggagggggaggtgtgtgtatctacagaactctactgaagtaacactgatcttgaacaaacctctaattatctccaggaaaacaatatctatagtctagagatgcagaaattatttggtttttggcttattccagaggcatagctctaactaataagtaaagctcataaaactataactctctacgttagaaacaaatactgtattgacactattttctgaaaatgtttaacatcctacttaaaccatctaaatacagtattctttctcaaattataaggattattatgctgcaaggaatcacagtatagaatttctcgtctaagaataagcaatgtggccaggcgcggtggctcatgcctgtaatcccagcactttgggaggccgaggcaggtggatcacgaggtcaggagatcgagaccatcctggctaacatggtgaaaccccgtccccactaaaaatacaaagaaaattagccgggcgtggtcgcgggcgcctgtagtcccagctactcgggaggctgaggcaggagaatggcgtgaacctgggaggtggagcttgcagtgagcccagatcgcgccactgcactccagcctaggcgacagagtgagactctgtttccaaaaaaaaaaaaaaaaagaataagcaatgcagaatgggaccacatgtgactgtggtcacatgggactagaggactgttaacattttacacctcctttcagagcaacagggattgtgcagtgtagtctctcactgttccttgctctttgaaaatattttgggatctgcttgccccaaactttcaatgagatctttacaaattcatttcaccccctaccctcttccctccatgtaaatatgtaaatcatttatgatttaacaactcaagacttgttgacttccagcctcctagacaggcagagttaagttatggatgcctgaaagttgtaactaactaatttaacttacttagctggctccccagcactgagtgtgtatttcctacaccggcaccagcatacaatcctgtgacagagcacatgcaaccactattatacataccccctcccttccaacaaatttggaataaagttctaaggctaggatttactatgtcccatcgtcttttatcagcctcaaggttgtattctgcttttggtttcactaatccacaaattcaccaaatcttcacctagcacttactatgcgccaagcaccatgttaggagtggtaaaacagtggtaaagttagatatagctcccaccttcaaaaagcttaccaactaatgggaaaaaacaatgaattaaacacacatctataaaacgcgtattaagttccaacagaagtgtaagataccacagggacacagcaaggacttcttacctagttcagagtttcagtaatgtttctcacaaaaagggtactttgagtatacaccatgatactggacttggctaggagggaagtggtgttctttacagaggggacaacactgcaaagatgacactgccttctggtaactaaaacaagttcaatacagctgaaaaataaaatgcaaggcacacagcacagagatgaatctggagaagtagagagaagaaaggcatgagaagtctgacagggcaaattaatgtgttagctttatcttgaaggccatgggaagccactgtgggaattttaagcagcagcagaatagaatatttatgtttcagaaaaatcagagaagctatactatgaagaacagactagagggaggccagactggaggcaggaaccagtaaagaggctgctgaagaaatcctggcagtgggtcacaccactgggagtaaagaggatgagcagattcaggaaattttcaagtaacagaaagtaaatcaaatgtactcccttcccagccccagtttactctcttttctcaatcttctaaagtggaatgacagcaagtgcaccccaagtgaaattcttagggttagtgtaaagatctgcagaagcggggatggtttatgggggagtatctttatacttcattttgcagagacccagagatggggtttcaccatgttgctcaggctggcctcgaattcctggactcaaacgatcgcctgccttggcctaccaaagtgcttggattacaggcatgagccactgtgcccagcggatactcatttttgattgtactttcggtatttattaatgaaagatataaacctcaggttaagaaagcgtgtacagaaacagccacaagttactcaatcttccctagagaaagatagagctgagttcctaaaggaccacattccagttgtcaccttcctctcaaggtgtagcagagggcaaaggaaaactacaatatggagaatagcatccctgaaagagttcctgggacatatgccttacaggattttctgggctttaatattcagagactgctgctcaatttttagtagaagtgaaagaagtctatcaaagcaagtctgattatcctgtccaaaaatccagaaaagtatgcatgactacaggggtgtttttgcctttccctacacatcccatctccctaaacaagcccactattaatagagaacagaggaagtgaaaggttctgattattcagcagaggccaaaatagttgggagcccaaagctgtgctgtatccactacattctcactatcaacagtgagcagcagagaaggtcttccttcctacaatctttccttagggagaatgggcattcatctgtgtgaagatagtagtctaacaagtttttttgcagtgtggaattaanaggtatgtctgcttaataaaatgcaaccatctattctctactgtcacactgtaacaatatacaaattcctagaaaaagccaagccctttcagagctcatgcttctgtagatactattccctcacagcccattcattccttccactaggaattgagcattctgagtacaaaatactgttgacagaggttgacatcagtaattaaaatagacttggtcctggcagtaacagcaactatagtcaagttgggatgggggagagagaaaaataatcaagtgtataaatgaaaactgcactacaaaaaaaaaagtacaaggtgcaaactataaacacattaaactggcaaggaggccataacctaatcttgggggtaggaaacgcttctctgatgaactgacatttgaactgagatctgaatagttaggagttcgttaagaaggaaaaatgggggattatccagatggaggattatccagatagagaaagcagcgtgcacaaaggcccagagtttcaatggcacctggtgtatctgaggcctgatggaaagccagtgcggctgcacctcggacagcaaaggccatgaaagaaaaaaaaaagaactaagaggcaaaagcaacaaattctaagaaggtggaaagcgggtgggactgctatgacctggcatacgtgatagagtttggctgtctgtcccctgcaaatcttatgttaaaatgtgatccctaatgttgaaggtgaggcctagtgggaggtgtttgggccacaggagcagatccctcatgaatggtttggtgccctccccaacaatgataaatgagtttttgctctattccttcaggtgagagcagtttgtttagaagagcctgtcatctcttgcttcctctctctctctccatgtgacacacctgctccccctttgccttccaccatgattggaagtttcctggggcctcaccagaagcaggtgctggcagtatacttcttgtagagtctgaagagccatgagccaaaataaacctcttttctttatataaattatctagcctcaggaattcctttatagcaatgaaaaacagactaacacaagaccctaaaaagctggatcttaaaccagtagtgagaaaggccaggaaacattctgatttattcagcgaaatcaaatgtctaacagcatgagatttaatgaacgagaataaacgagtattatacagcaatttaaaatgatgcagatgtatcacacctacacttttttttgttttgttttgagacagtctcactctgtcgccaaggctggagtgcagtggcacgatctccattcactgcaagctccgcctcctccaggttcacaccattctcctgcctcagcctcctgagtagctgggactacaggcgcctgccaccacgcccagctaattttttgtatttttagtagagatggggttacaccgtgttagccaggatggtctcgatctcctgacctcgtgatccgcccgcctcggcctcccaaagtgctgggcccccaaagtgcatgagccaccgcacctggcccatacctactacacttttaacaaaaacaagatgatagctatactgagatatatacatgaaaaacctagaagacaagaaaatttgaatagtgattattacgaagtggtagaactatgagatttttttctcatcttattttctaacattttcaagtattatttaatacttaaaaccacacacttatacattttaaaagctataaaaatattcttacttttacgcttaatctaaatcttctttcacgtccacagaattcctttggttagtgttttttctgtggtaataccatgcactagggaaagcacgtgatgacttacaacagttaattttattgtgtcaagttggctaggctatggcacccagctatctgctaaactccagatgttgctgtgaaggtattctgtagatgtgattaatatttataatcggctgactataaggaaagcagattattccccataatgtgggaaggtcccattcattcagctgaagaccttaaaagcaaaaactgaggcttcgcagaaaagaagaaattctgccttaaggctgtaacagaaatcctccctaagtttccagcctgccctacagatttcatactcaagacagcaacatcaattcttacctgaatttccagcctgccaacctgcccccacaaatttcaaacttgccatcccctacattagctaatcttttaaagtaaatctatccacactctattactctctctccctcccgccccaccctattccctctctcaccgtctctctatgtaagtacagctgacccttgaacaacacaggcttgaactacacaggtccatttatattcgtatttttttcaatgaatacagtcggcccttcatattgtggattctatacccgcaaccaaacgcacatcaaaaatatggtacttgaggaatgcaaaacccaagtatacaaaaggctgacttttcatatctgagtgttctgcagggttgactgcaggacttgaccatgtgtggattttggcgtccatgggcaatcctagaactaatcccccgagaatactgagggacgaattatatatatgtattatttgtttctctagagaaccccaaccaatacatgactgaaatccacaatcaatcaaaacctaaccacccccatttccacctacccacttcagcatctttgattctactaagggactaagtagaagggatgaaggaaatcccatacctgtctactttcaactacgttttatggggcagaaggctggggtactacagctgtcttaccacaggttttcggaatggagctttcttctctctgaaggtcttccagccagactgcaagcacagaggaatctgcattccagagcaagtcatttacctagaagggaaaaaagatctgtcattggctttcagttatggatttacttccaaatctttataatagctgtatttcctctctcaaatcaaataatcccactacctgagctcatccctagctgtaaatcactaacctacagaggcattaaacaaatctgtaaaatatgtcattattatgtagaggacttaaaaaaaagaaatacattatgcttaaagattaaaagagacttaagaaacttaaccaaatacaaggtgacatttttagacaatcagagaaactggaatatggactgggtgttagacaacacagagataagatgtaataatagaattatggttatgtaaagaaaaatgtccttaactgttataaataaatattgaaaatatgatttctagaattaaaactccaggaaataaaaatatatgtaagtatatatatgtataggccaaagagttgcggaccgatgaaaatagttttgcaaaatgttggtatctactgaaagtgagtaatagttacatgggagttcattaaactcgtctctcaacttaggatgtttaaaattttacacagagataccatttgatgtgttctcacttcagcaagaatcttaatggtatacaaaccacttaagatttaaatgttataaatgaaaaacatcttcattactggaaaaattatgcttttgtcaaaataaacaataaaaactagcatttttatttcctacttctgttttatctaaggtgggggacaaatgctattatttgcaaaatcactggaaaaacaatattttattaaataaaaatcagttctaggaagccaccatttttattactatttactctaaagctactatttatatatccatatcaaatataaatcccctctataggccaggcgtggtggctcacgcctgtaatcccagcactttgggaggcagaggcgggtggatcacctgaggtcaggggtttgagaccagcctgaccaacacggagaaaccccgtctctactaaaaatacaaaattagctggctgtggtggcgcaagcctgtaatcccagctactcgggaggctgaggcaggagaatcacttgaacctaggaggcggaggttgcagtgaaccgagattgcactatcgcactccaacctgggcaacaagaatgaaactccatctcaaaaaaaaaaaaaaaaaattccctctatagctatggaaagtcctctacattcgagggtgaaacaaactcaggcacttaccttaacctcatctttaaggaagggaagtgtaaagtgtccatgaaggagtccatttttctcaaaaaacacaatatcctgctggttgggtttatcttgtgtagatgcaatcaaactgcctgagggtcttaaagcaaactcagagtgttacaatatcgaaagctcacctaactaaagaatagataaaatccagaagagttttttttccagcaaacatgaatgaatgaatgaacgaattaatgaatatctttatccaaggaagttttaaatcccatgtgtcccttgtctctcggcgagcggttcatcccactgtgggactgtacttgcccagaggaaagagtgccttttcctgttttacacagaggctccatttgcccacaaaaccttacatatttacattgcatttggatgactttaaaaataataagttatctaaaccattccaggtataatgtcctaaaaatcaaaatctatttctccttccattatacaacttcagcaaatattctatgctccagtaggtcttttttaagacttcaccaaatgttgaaaacatcttaattgcctcatcttattcatatttgtctctagggttttaattcaaatacatttctcttctgctctatcatataataccattcagatactggtgggaaacaagaggtctacatacaacagatatcaccgaaacagaggagatacatcttctatctaaaatcaggcagccacatatgacaggcaaattgtaacctgcacaagggtactgggccaaggaggagaatggaaggaaagagcagggtctgaatccagcctgcatgctccttggcaagcagatcctctgctgtaggaattttgtgccaaggaaggaggctctttccctaatttccacaaaagcaccatttgccccacagagccttgcaaactgggccttcccttctaaacaccattttctgctctgtacaatggcttcatatataccctgccttaaaaccacagccttttaagagttaggaatgcaaaatatatgcggccttggaacaatgaaatctgtgaagaagcgtaaaatctactattcgagttgaattcagacttcagggaataagaaaaaaaaaaaagaagaaacaaagatagatacagccttataaccaaatgaagaaacgtaaaaatccttttgtgttacacaaacatctgtatcatctgtatccatgtgtaccaccacctctactctggttccaagaatttctctaaggtttcttctcccactcacttccaagccagggctggtcccagtcctgccacaggctcactggttgactgcaaagcaaactctcggttccacactctgaccttccgagcccctgtgcgggagtggagtcaaacacacatacacacttaaaacattatgataaaagttgtcaattcagaactattcaaacaccttccttacaaataaaaactgccatggttttacatagccaattagattaattttgttacaaatttgtgtccaccaggtaggaggatggaccaaatggcctcaaaggactcttctaattcttaactctaacctcatttcacatttaaagcagcacatccttgcctcatatgtataattaataccctactcaaagcaaaagaaagaaaattttccttaattttaataagataaaaattttttattgttgtttaactgcaatatatttccatacctgtttctgggcaaacaacactcacagcaaaaaactgtccatccccccgccaggtaacttgtggtctatggtcatcccagggcaaagcagactcatgctaaaaaggggaacaaacaccaatattactgggggaccttaagtatcccagaatcaaacaagcctcagaccactagatacagatgttttttaagaggtttaagctactttgaaagcctgcctctagaatcagaaaccatccaagggttggttcttagaacgcagaaatcatcaaaaagaagaaaaaaatgtaaaacaaacaaaatcctcctttcggcattaaaaaaaaaaaaagtggcctctgagaacagcaaaagaggaaaagagctacagatctagatcctgaatataatgagctaaggaacctatcaggtaactacaacaaggaaacaagtgttccatttgtccaacagggtagagttttgtttacatattgtgtaagcttcacaacagggcacagatgagttaagatgtgaacaaggtgaatagggaggagccacagaggtggtaaaggcagcagcagacaatgacgaaaacatggaaatgttctcattctgcagcatgacgggaagaaacgtctcctccagggccacgtgtatctcaatcctgaagccaactctaccgggtgggagacagatgaccacccgggcattcatcatcatattctagtaacagcctaagaattctgctagtactgtactgtagtctgcacagtagggaatacataggtagcctaacaaaatttattctcaatgaaactgtcctagggtatagaaaccaaacctcctttactgaagggttaaggcctgaaataggcattatatgaaatagaactggaaataattaaggacagaaaacgtagatggcaagcagggtattattgagtcatctattctagaagagtagctcatagaaatttctacatataattatgcttccatttgttcaggcccaacccttggtatcctcctcaattcctccctctcacccaatttttttttttttttttttgagacggagtcttgctttatggcccaggctggagtgcagtggcacaatcttggctcaccgcaacctctgcctcccaggtacaagtgattctactaccttagcttctcaagtagctgagattacaggcatctgccaccatgcctggctaatttttgtatttttagtagagataggatttcaccatgttggacatgctggtcttgaactcctgacctcaggtgatctgcccaacttggcctcccaaagtgctgggattgcaggcatcagccactgtgcccagctaaatgcaacctcttgaatcagtgttactgggcactaggagagcccaggcagggaacaggctgagggctagaataacacaacttaaaaaatcaaagtaaattatgctcacatgagtacttgtatctgcctactccatggatttttgttttcttttctgaagggtagctgtgaactttcaaaccaagacgaggccctagaaagcctttagaaaaagttcatgaaaaaaagctagagtagtttactggatagtacattagataacaggatgctcggtttttttcccccattacctggatcatcctataccattaataaaccctaattttgttaatactagataagtcttactctagcaggtaccagtagtaaagtgtcatcttctccagagtttaacaaagtatggaaaactgccttattttcaaaactaccatagattcctttaaagtactattttttaacacctttactgggatataatttacatattattaaggttcacccatttgaagtacacaattcaatgcaccttgggatttttttttggttgtttaaactcagtggtaagaatcaatgtttttaaagtatatttacaaagttgaatagccatcaccataatctaaattttgagcattttcatcatccccaaaagaaaccccatatccattagcagtcaccccttccccaccccaccccacagccctacccaaccactactctactttctgcctctgtggatttgccccttctgggcacttcatacaaatgggatcatattatatgtgatcttttatgactggcttctttcacttagcataatctttatgaggtttacccatgtcataacatgtatgagtaaagtgctatttttaaatcgaaaagatatggtcttagaaagctgtaccataatttacttgttgcttatagcaagaaagaatattcaaattgcaccaactatttacttggtcaagttcctgtttagtcaaggataccttttaagtcctgccaaaaaaaaaaaaaatcacttaaaaatcagggggacatgaaaaccacttgtccaaagctgggcagttgtagtggatcacccccaaagaagcaaggttgtgtctcagagtacttactccatgtttctgccctctaataatcctttactgttctaataagtcaatagctttcagaatgttaaattagacccactatgcatattttactcacaataaagttgttttgaaataaaaactacgctttaaaaagtttcaaaaattatttgtctactaaaacaaaagcagcaactaccatttgagtgcctacactgtgctgatgctatgatagctgttttatatatgctattacctgcccatctcaacccttgtaaggagacattatgttgtccactttacagagaatactgaggctcagaaacattaggaaacttccctgccaaggtctcatagcttctaaatgttatgaggataatgtaatctgtacttttctaacagagatctgtaatgcccctgggggtacttggtagtgtgccagagggtaaatatggcacatcttcttggggcattaattttactcaagggtaatacttttcaattcatagttttaaaaaatattcatattgtataaattaaaataaaatataagagtttaaatgaatttaatgtgacacggacactacttccccaggtgccccaagagtctgcactcttcttgtgtccacacacctctgccttcaggggccgccccgcctacattagaagattaaaaagtcctgccttgagtcatcaagacatcattatatggtcttcagaattttccaatccagaagtaaggaaaacaaagagtttcatccaacagaaaaagaaaaatatctaatatacacatatatgggaaaagtatgagaacatgcatgtgaatgaaggatggcagctctctctggagaggaaggggagggacatcgggacgggatacacagggggtttcctttgtctgtgatgttttattttttaaactgggtgatgaatattggttataattatttgctactatgaaaataaatcacaaagcaacttggcaataacaaggaaaaaaaggatctttctagagggattcatttcctgaaggttctaggcagttttactaaagcagaagagaactgttcattactggcatctaagtggacaccaaagagttcctggtgggtggcaaacttacatttgttccagtcaaggctttttatccatcaaaccaaacttaccatttgcatctgaaaagctgcttgtctgccttctgatccatggaactgtgtctccttcctaccccatccaacagtgataaacttgcctacagaacaattggcaagacaactaataagccacatgaaatgaaacaaaaacagtttcactgctattcttcatgaagttagtcattggcaattactcaggtcctctaacgcctctcaataaattgaccagcagtcaatatttgagaaacctatgtttcaggctgggcatggtggctcatgcctatagtcccaacactttgggaggctgaggcaggaggatcacttgagtccaggagttcgagaccagcctgggcaacatagggagacacccatctctacaaaaagtatacaaaataagctggacatgatggcacacacctgtggtcccagctactcaagagactaaagtaggaggatcacttgaacccaggagttcaaggctgcagtgagccctgattgtactactgcactctctagcctgggtaacacagcgagacccccatctcaaaacaaacaaacaaaacccatttcatattatatgcagcagtgactttgaagaatttgaaatgcccttccttattttggaaagcattttactgccatcttacatattccaagtttctttgatgacacaagtcagcgatctcaccctcacctttatagtaagaagaatgaaacataaagagtttacaaaatatgtccggaacataaaccccaagatgagaactgggaataaaattctgattgcaagctctcactggtgatagaggggctgcaggtcacaaaacagctcctcacatagacttagagattgagaccctccctaatggtggagccaaaagttagaacacaggtcttctgccttccaggctgactggggttctttctagatcgtaacacttctcttatataaactattaggcagagttgctgaaacaacacaacccttctgttcctggaggtaggatccatttgcaagaagcacaataaagatggtcctgaaaacatcacctaatccaggacccaatactttcctcctgccattgattctgattctgatgaagcagggctgtttgcaattcctataaattatgggtccatatgaccatttcctgtctgctcacatccaagtgctacagtacctcaattgctgctgcgtacaaatggtagtgactatcctggtgcaaacccccaggcttctatctgcaagtttccacagaaagattaaggaccaaggaatgaagaaagagaacttttccaatggaagacaagaaatgatgcggttacagcagggatttgcaaaactacagcctacatctgcttttacaaacaaacgtttactggaacatagatgtgcttatgtatcatgtataactttcacacctcaacattagaattgagcagctgcaacacagatcatacagcctgcaaagctgaacatattcatgacctagcccttttcagaacaagtctactgaccccaggatagaggaaaaatattcatcactccatagaatgatttttttttttttgtactgagaaacacatttctgagacctaagatcttaacttggcctacatttcctttgatttactgcattaggatttgtgtgaaaaagtcagtgggaaacaccaggcccagagcactttcccatcccaaagtatactgtgtgctgttactctctctctgactgtcctcaaagctggatgccccagagttccaccctggattctagactcttcctgtacagcatctgctccctgagacagtccatctgttcccaaaactgtcagaatttcctacatacccactactctcagtccatagctctggcctctcctgagcttcagccttatatttgcatactccacatggcaatcacatatggtccttcaacaaatccaaaacagatctcaccacccaccccttacagaccagcacttctccatcttccctgttactggcatctttattcccaacacctgaggttctggctggagtcctgctcaactttttcttattcaccttacatacgcaaagcctatttatttcactttctaaattggtatttctcaaactggcctagggcagaaggggaatcatgcacatatattctaaaaaagtttcccagctaattctaaaaaatgtactcccatcctcattgtgaatcaagttttttcctgaatgattcctgcttctagccccacacaaaccttccttatctttcatctggattcctgtagcaacctcctacctgatcaccctgcctctcatctcttccctctccacacacaaaaacaacaaaaatatgccatcacgagccatctttctattaaataaatctctttaaacctcttatcatcaaaacttgtaatggctgatcaactataactcaatgtccatattccctactacaaactcaatcaaatctgttccatttatttcattctacactcacattctgccacttcagcaatgctgaattactcacagttccctgagtaacccacaatgtttctatgaaataaccctcccttgaaatggacacttgaaatggacacattcacttgcttggactgttccccacccttatccctcacctacccaataccaattcagctgactactccaaacccttatccctcacctgcccaataccaattcagctgactactccccacccttatccctcacctacccaacaccaattcagctgagactcagctcaagttggcctcctaggggaaataaatcatccctctctagttactcgtttccttcccttatgctaccccagtacctgcacatcatgtcattactgtgctgataccaccaagcccagctaatttttaaattctttgtagatgctgggtctccctacgttgcctaggctagtatcaaactcctgggctcaagcaatcctcctgcctcatcctccaaaagtgctgggattacaggcatgagccactgtgcccagccctccaaaattatttctgaacaaatacattatttgtaaataaatgggtagaagttgtctaaatgatttctcagagttgatggagcaagaaggcaggaagttagaccataacagaagttggaacatcttcttccccatccctcttcaatcaggccagctactttgtgacttcaagatggccaaagcttatgcttaataagcgtctctcttctcctgcactgcccttcaatacccccacagccttaatgcccagatgaccttggctagattttagcaagaaaataatctgattgttcccatggaaatgcagattggatctaatcgtagtaacaaaaaccagccttctattccatctttcttcttttcttctccctaaaactgtatcccagaaatactaccttgtacagtccctttcactgaaagcccagcctaagactttcctagggtttgggtaataactatctaagtgaccttaaaccctcagacctggagaggcatcagtaggccttttaagatttgggatgggctgaaggaactgggctaatagacatttaatagctgggggtttaactttcacagttctttggcctaatgacatggctattagtgcacaaggaaatggtcaaaaatgggaagaaacgtaggtcacaaaatattgcacaaagctatacttactttcaccaaaatcatcctgatggatctgctgctccaggattggctcaaaatcttttgtcatcataatcagggtctgttgaccttagagaaacacaaacaaaaatgattttgttttcatgtaacaaatttgccattcctaagtacctatggcactgtaagctaaggagctggagttagtctgaacagagcagacagaattcatccaaaatgctttgacttaaaaaaacaacaatgacaaaaaaccccaaaaagctttccctagataagtcacctggtgcttatgctcagctattaatgtgtgtacagttgaacttaaaagtccacaaagccctcctccactaacttcaacactccttgtccccaagatacctctaaatataaatgtcatcagtggagctggtttactaaactcatctggaatgatgagacttaaaggggaaaaacagcaacagaacccaagaagggcttttagaatgtgtccatacagcaactcttagaataagttaaaatacatattgctgacatttttaactctaactggggacttagcagcctccccaagttttatgactttgtttcttactcccaaagacttaaaaagttacatgaaacaactttttataatgatagactaagaggcaaaacttcagtcaccaaaaaaaaatcactctacgttttatatatatatacacacacacatacataattggtattatactggttcataattggtattatactggttcaaagaaattttttgaaattcaagcagcctaaagctgatgtttaagctcaaaaaaatgtgtttagcttcttacaatttcatgtagtatttgagattaatagctccatagagagatttgattgtttagccatccatgattctgtgaaggagaatgttaacaatatctgtgttttggaatttgaagatcgaatgattttttgttttttttttgagacggagtctcgctctgtcacccaggctggattgcagtggcgcgatctcagctcactgcagcctttgccccctgggttcaagcaattctcccacctcagcctcctgagttgctgggactacaggcatgcgccaccacccctggctaattttttgtatttttagtagagacggagtttcaccatgttggccaggctggtctcgaatccttaccttaagtcatccgctcacctccgcctcccaaagtgctggcattacaggagtgagccactgcgcctagctgagattgaatgatttttgagcgctactcttagggaagcacgttttaccttgcctttttaattcaaaggaaatgtaggctttgagaaatacatgtatgcaaagtcttgtgatttggcagaaaaattaaattacatgtatatctatattatatgtattacatcaaaatggaatcatagttttccataatccattaaatcaggtctttgtatcttaatgctgtggtaatttaaggcccacctctattgttttgattctctctaaaactgtctttctcctaagactagaaagagcaagggagagttttctctgacaggtgcattgtagaaacatcttttacctaatattttcctgattatttgggctctcttcttatggcagccatattttgtgccaaatttattaagtccttagtggctgctgtggattttgccttctgagtaccttctacatttgattactcctcatttcctatgtcaaggtttttcactattgattaaaacgtaatctgatttttggaagctgctctccactgtagtctaaaagtctaaacttattagcccatttaccttctagaccattagttttcatcacttctttttatttttcctcactcaattggatagttaattaaataggcattattttttaacatttattatgaccagagcatggtatagtagtgcctgtcctcagggagcatgcaatataaatggttgaagtttgtatctgtattttttttttttttgagacaaggtctcactttgtcacccattcaccacagcctcgatctctcaggctcaagtgatcctcctgcctcagcccctcagatagctgagactacaggtgcgtccactggctattgttttgtattttttgtagtttgccatgttgcccaggctggtctcaaactcctggactcaagcaaacctcacaccttggcttcccaaagtgctgggactatacaggtgtgagtcaccgtccccggcctatatgtggttcttctgtcctcaaacagaacttctgttaggcagttggaacaagatacagctttaattaagcaagtcacagagcagataccatgccatgcttcctgttaaactgagtggaacagtttaaattgctcttctagattgttccatacttttttttttttttttttttttgagatgtagtctcgctctgttgcccaggctggagtgcagtggcgggatctcggctcattgcaagcttcacttcctgggttcacactttctcctgcctcagcctcctgagtagctgggactacaggtgcctgccacaacgcctggctaattttttgtatttttagtagagacggggtttcactgttagccaggatggtctcgatctcctgatctcgtgatccgcccgcctcggcctgggattacaggcgttgagccactgtgcccggccctgttccatacttttttttttccagatgattttattatgctggcaaactgtgtgtcaaatgctgttgcaactctcttttccttaaagtttgttagcaggaatttcatttctcttagttatagcttaaccttctagtcatcataggaatttgacatgatcttgggacagcaggctgtgaataaggtggcccctaaaagcttttctacagcttgtaattaccctggacttactgaaactataggagttcttttagggcttttgtagggatttaaaaatggtaataaaggaattgttgaacttgtgtgtaacactgagctcatggttcaaaacagcaaattgtgaacctttaggttgcaaggccagagctaagaacacaaatctctagagttagggaaattatgtactgattgagatacagggtccaaacttgaaggcaagcctcacagttgagtaacacttctttctggccctaccaccttcttaattggcttctaacaggaagcttaacctctgcttaaagagccacttcactgcccaactccaggaggagacagtgtggtttgagagtggtccccactgaagttgccgtgcacagccttgggccatttgtagcagccctgctagtattcagcttgcttctctactgaaccctggcatctgttcagatgttgagagcagcatcaaatggggaaataggaacaacattactctgcagtggtacaaaatcatgatgcgtatggaataccttatacttttctggtcactaaataacgagcaactaaggaaaagaagaatatttgacaagaacagctataaaagccaaggagatgaggaaatgtcaggggtttgtattatttacccaggaagggggaatatgcaaggggccagaattgtagtcactgaaatcttcacgatgagattatcttttgtttatgtgggctgtaaaataatccctgactctacaaggattcagacttcaggaagaagataatatataggcaggtggggatggtttgaaaagttacttggtccaattccatctgtgtggggagtactttgagtcccaccctgctttttaacattgatcttctttttaatactagctttgttgttttagaaaggttttgtgaaattaaggtaccttttcatgttacaacttgttaatctatattttgtttatatatgtattttttgtctttttttagtctggatactcaaaaagcttgtcattcactttggagttgtggatttcctagagaaacgctaccatgtgtggtggggcattatagaaagcttcctgaaggagcggcagggagctctcgcgccttggcccattgtcgggcttggaaaattcttgttaaaagttgatagcaaggtattgtattttaaggacttgggctgtcttaatggagttaatatatttcgtggtttgaacttttccattctatggtgtttatattgtaactgttgataacacatgtaatatctaattctatgatgaaagtttaatgtttaaaattatggtttacacaaggataagatgggtttactttaaataaggcttgtgtaagtattttttcctcataaaaatgggagaaatggattttctgatttaattccttcattatattaggaccaaattgaaatccagagaggttaagcgacttgcctaaaattatgtagctaggtagtggctcagtttagtgaatatttttggagtaattaccatatgtcagatactgtattaagtcctacggaaaatcagatgaatcatggaaaaccagatacagaagccttgtttattggggaaagacagcagttgataaaaattcagagatggcggttagatttagagccttagtggttaaagagcatggactatgaatccatgaagtttcctaacctttctgtgccttggtttccataccagtaaaataggtacaatagcacctaccttgtagaatggtggtaagggttaaatgaggtaatatatgtaaaatccctagattattgcctggtacacagtgagctctatgtaagtattaggaatttgtgtaggaaaagtgtgtatgggatacagtggcagcactgagcaagaaatgactcactgttcatagggtcatgagaaagggaaggttagcagaggaagtgatactggagcaagttttgaagcacaggcgggagtttcttaggtagacatggccagaagggcaagcagacggagcagtgcaaaggcatggagacactaagcctacgagcatgcaggttattttatgtatttttaattgttggattcccaacaaagatgtggttatcatcatttcaatcattatatatcttaaaggaatactacattccgttgattttaaaactttgatgtgttacagtttttccgtccctagtttttcctttgtctgggatggtttccttctcatgctttccttttcttttcatactatggttgcattctctaatgatactccactgttcttatcttctctttctcaccttaccccctatcctcaagctctggcactggctaaataagaaggtaaatgaacacccagatgttggtttttactattgaattccgtaatgcccctgtatcgcctttttcactctatgtttctgtccatgtgtcaaactaagtttttgttttcaaagttttaattataagctatggaaggttgtgaagcatgaatactatcacagtataatttggtaaaaactcagcaaaggctgtctaggatatggatggtatctccttgctcaggtgtttgtaagaagttctgtctcatagtccttttgtcccctgtaaatccagttctgtaaatgtggctcagcctgatattctagtctcctttgatgtgtgaaaacacattaggcaatagttattgtaagggcaagagagaactctctgtttgatactttttctataaaagacacaggaattttttaaaaagacaaatctgtgaaatatttgtatggtttccttggcagataattttatatattgtctttttttaaataactagtatttcaaaatttatttttaacttaaaacagatagtagtcatgacctgtgacatcgaattttgtgttttctccaaggtatgaggttgtgtctatggtaaatgcttcacatgattggtatggcattataataggcacacttttaataacttcaataaaggctaatccagatacattaggaatgttgtacctcgacatatagtccacatatcgtaatgtttaaattaattttaatgaattaaatagccaggccttgtggcacacacttgtagtcctaactacccaggatgctagggcagaaggattgtttgagcccaggaattcaaggttgtagtgagcaataattgcaccattgcactccagcctgggtgacagcaagactctgtttcttaaaaaaataataatttcaatgaatctctaggacagatagcaagagatgacatcatttatatatgttgtgtttaaacataataaaactatatatatgtcttttgtggaaatattatatcaggccttaagaaagatgtagtacttcttgaaaatagatcaaaatgagacttttggatgggttaggatttcatttttttctgttgaaatagaggagaggggagacttgacaatgcctaaagttttaaagttgagttgaaaggaagcattgtgtaaaataaacactcccacactctcacatggttgtgtatgtctccattccctataaaactagtatgggtaagtgagttcaatccttggcaaatgatgtgcaaatataagtcacgttttaaaattttgaccaaagaatgtggtttctaaaaaatttttatttgttctaattgttttttagagacagggtcttgctccgttgctcaggctggagcagtggcacaatgaaagctcactgcaactgtgaacttgggctcaagcgatgattttgtacttttcttcaatttgtgttatattgaaatgaaattgccctcaagagatgggggaaaggagaattaaattcattggattaaatttgatttaaccttcagtggactaaatgagctagattacctaatttatgagactacttcataactgaatcatcgagttaattttaaaagatctctaagatcaagtcctttttttctttcctttgatgattccatataacatagtaaagcattggtgtaaagatagagtaactgcttgagattttgagcgggtacattccaagaaaggacatacataagttgagaactattttattacattacatctcaaagtcagaaaattgcagcactgggtaatgttggtatgtagaaatttcaagtggagtgaattaggaaaccaattcaagagaagagagggtgagagagcacacatgggttaattgaaatgtaacccatttctcaagagttacttgttttatttcttttcctttttttttttttaaatttgagacaggatctcactctgtcacccaggctggagtgcagcgacgtgatcttgactcactacacaacctccacctcccaggctcaagcaatcctcccacctcagccgcctaagtagctgggaccacaggtgtgcaccaccatgcctggtgttttttttttttttttttttttttttttgtatttttagtagagatggggttttgctatgttgcccaggctggtcttgaactccttagctcaagtgatcagcctgcctcagcctcctaaagtgttaggattataggtgtgagccactgcacctggctttgttttatttcttagtattgattatttgcactaaaactcaagtggaattttgtttaaaaacaaagcaaaatgaaaaatatataggcccagaataatgaaagagaagaaaaactcagtagtggaatactttcttaatagcttgataaataggccagttagtgtagaagttttagagtatcttttggtgtaactataaatttactgacatctctaaatttaaaaaatgcatgcccttcattcacatttgaaacattcggaatgtcattttaaaattacttctctttttttgaaaaataaactttaaaaattaaagtaacttctcagtctttcagcatggaaagattggggacatttagagacttggtaatttccatgcgagggcaggtggattgggttcctttgcccaaagcagaacgtgggacaggatcagcctcgtgagatagcacgtctggcctttggtccccttctccattgcttcctctctttatgtttctcttcctatctctccgagttgctgtttctttgtgagtctttttctattcagtctttgtgggagttggttcatcttttcctccatctaagttttttatcctcttcactttttttcctcttttcgtccttagttttatgtatcaactccccgtgcccccattttttttttgcttgaccttctctgtttccttttattcttgaataaatcttagtctctgtttctctttcccactctttcctctctcttactgtctcccttcttgtcctgttctcagctaacttaactggccacatgtgacgaaaacaacaacttcttagcttcttttttgagcatcttaaataattttgtttattttaaatttcaatgaaacatccaaccctcactgtcatcccttggatatacgtttttatttaggtgactgaatttttttcaacctttatggcttgtgatagaaaaattttaccctaacttaaaactaaaaaattggatattgtaatgttaatgtacctaatatgtttttgaatattctatgttttatatgttaaaaatactcaaacatgtttctaagtagaatatcatttacatttaaaaatacatttcaggatatgacttttctgaaaaaaaaaaaatagaggctctacattattttcagaaattgtaatttgtggatacaaatacagtcttaattctgaaattattttatttatgcttgcttattcaaacacatagtaattgaatgcttaccacgtgctaagcacttagattttggagatacaaagaggagtgatacaaacctagctctttccccaggaagctgccttgataactagttttcaattggtttctgattgaaagttttcagtttcattgattttagaatttaacttcagaatatgacatctgaccttccatatcttagaaacctgttattccttttttttaagtctctgcattgtctttgatgccttggtagcatgcactgaaaattaactcttctgtttgaagctgtaattgtcaagattaaagattaactttttatctttgagttcactttagcattgatctcttagtgacagtgcccttgatgaaaaacagataaggggggcacaagcttataaacgtcaagtgaaagtaaatgctgcagaactcatgttgtttttttaaccaacattctttgcttttggatgtttaattcactggagagcataaatcagatctaaattaagaataacttatttagcaatgctgttgctcaccttggggttgagcagtgcattgtg

SEQ ID NO: 3934 - DNA, 954 bp, Homo sapiens
gtgtagaagttttagagtatcttttggtgtaactataaatttactgacatctctaaatttaaaaaatgcatgcccttcattcacatttgaaacattcggaatgtcattttaaaattacttctctttttttgaaaaataaactttaaaaattaaagtaacttctcagtctttcagcatggaaagattggggacatttagagacttggtaatttccatgcgagggcaggtggattgggttcctttgcccaaagcagaacgtgggacaggatcagcctcgtgagatagcacgtctggcctttggtccccttctccattgcttcctctctttatgtttctcttcctatctctccgagttgctgtttctttgtgagtctttttctattcagtctttgtgggagttggttcatcttttcctccatctaagttttttatcctcttcactttttttcctcttttcgtccttagttttatgtatcaactccccgtgcccccattttttttttgcttgaccttctctgtttccttttattcttgaataaatcttagtctctgtttctctttcccactctttcctctctcttactgtctcccttcttgtcctgttctcagctaacttaactggccacatgtgacgaaaacaacaacttcttagcttcttttttgagcatcttaaataattttgtttattttaaatttcaatgaaacatccaaccctcactgtcatcccttggatatacgtttttatttaggtgactgaatttttttcaacctttatggcttgtgatagaaaaattttaccctaacttaaaactaaaaaattggatattgtaatgttaatgtacctaatatgtttttgaatattctatgttttatatgttaaaaatactcaaacatgtttctaagtagaatatcatttacatttaaaaatacatttcaggatatgacttttctgaa

SEQ ID NO: 3935 - DNA, 286 bp, Homo sapiens
ttttagtttaataggagaattaggatctggtcttatgaattctaatctagttagtattcttcactagatcagaatttgctgattaccaccttccatccttgtctcattgatccttctgctgatatataccatagcacctttatttctcgctttccaggtccttccagcttacatttcctttccccattttcatctcatcaaagaaaattattctctaaagaacacctaaaatgttatctttatagtgatatctcttactattttttttaggcttatcaagtctgac

SEQ ID NO: 3936 - DNA, 286 bp, Homo sapiens; identical to SEQ ID NO: 3935

SEQ ID NO: 3937 - DNA, 954 bp, Homo sapiens; identical to SEQ ID NO: 3934

SEQ ID NO: 3938 - DNA, 1006 bp, Homo sapiens
  SITE (871): n equals a,t,g, or c
ttagtagaaacatggtttcaccgtgttagccaggatggtcttgatctcctgaccttgtgatccgcctgcctcggcctcccaaagtgctgagattacaggcctgagccaccgtgcctggcccacatgtttattttcaactttacttccaaactttatgatcacaatggaaggctaccaggaaaaagcattcttttagtgggttttctcatgaagatttaggaagaagataacttggcaattagagtaaaagtattaaaacacttaatccaagatctagactagcatcattgtgttgtattgggcttaagatgcttattttctttcaggtgctttgcaagcacttatgttcaaggctatctgggtattaatcctgattcagctgtccaaagaagataagcatgaaattatccttccaacatctattaagcaagcaagacttaatcatgccaaaaccaacctttactaaacagatgacatataaattaagaccttagttatattaggaattatagttatattaagaaatattatttatattaaggattttctcaatctccttgctcactaatgcttaacttagtgatcacagcaaacataacctagtctcaaaccgcattattacaacactttgaagttagaccacatgctgatgttctgtgagcacagatgttgtggctgttcttgtgcaatgtgtgtgtgtgtgtatatatatatatacatgtttttgagatggagtctcactctgtcacccatgctggagtgcagtggctcaatctcggctcacggcaacctctgcctcccagttcaagcgattcccttgtttcagcctcccgagtagctaggactacaggcgcgcaccaccacgccggantaatttttgcatttttagtagagacagggtttcatcctgtgcaatatttttatgctcagcatatcacagtgccatcccttgacacactggttaatcggtggttctcaactccgtctgtttacaatcacttggggg

SEQ ID NO: 3939 - DNA, 231 bp, Homo sapiens
tatcagctttattaaactatgatttacaaataataaaactcaccaatttgaagcattcaattcagtaatgtgcacaaatatatacattctataaccatcattacaatcaagatgtagaatatttccatcaccccaaaaagttccctcatgcccttctattgtcaaaccctccctaaactctggcctctgatggccactagatatgctgtcactataattctgccttttcta

SEQ ID NO: 3940 - DNA, 2718 bp, Homo sapiens
aattattaatttttgcggctggacgcggtgactcatacctgtaatctcaacactttgggaggccgaggtgggcagatcacctgaggtcaggagtttgagaccagcctggccagcatggtgaaactctgtctctactaaaaatacaataattagctgggtgtggtggcacgcacctgtaatcccagctactggggaggctgaggcaggagaatctcatgaacccaggaggcagaggtggcggtgagctgagattgcaccactacactccagactgggatttaagaaaatgtgtagttaaatattgcctaaaatgctcgaatgtaggttataaacaatgagaatagggcccatgaagagattttcgtttttcacagaggtgagacttaaaaaggccttgaaggataaatagaaatagaagcagagtagaagggttattccaggagaatattagtttggatgagggcacagaggcaggaagatggagcttagcttgagggaatggaggtcactggtgctgtgaatatttgcagacagccatatccagagctgagaggtgaaagaacagactggaatagttcttttctttttcactctcctaccttatttgcttttggtttagcaaggaggatcgaaagtaaaccaagagaaatggtggggggcagcagagggaggtgggagggaaactccaggatgagttatggtcagccaaaagaagctgttgaaataaaatgaccaagagttaatgcctttatagacgcagggatgcacagcctagatccccttcctctaaaggacttgctgcccatccactgaaagcttggtcagcagccagcccccagctatcggctctttcagggcctgccttgttgcaaagggccgcctccctgcaaagagctgccttgctcaaagagctgccttgcactaggtcatgctcttctggtggcagcttgcatcctgtcacagagaggcaggggtgtgaaagcacagccatctcatttgctctgcaggacaatatccactccagagttcctgctagactggccaagaccttgttgccattcaacttctttcccattctactcgctccctccttccttcacaggtgttgagccctaataaaattttgcacccgaaattctgcttcattatctgtttctggagaacccaacctgtaacattttcccagccagggctgaatacacacacacacacacacacacacacacacacacgtgctctctctgtatatatgtttctgtgtatgtatatatgtatgtatatttttaattacttttctccattcaatagtatactgcctatcaattattagcaaattgtattttcaacctgttggcttatttattctaaatatagccattttcctctaaagagaaatctttgttgccaaaagaattttataatggcaaaatcagtcattttccccactaatcgcaatgtaattttgcccattttgagatgggcaaaaatcatatgttcagaacagtaaggtgagacagaatcagctaatttactgataactgtgggcactacctgaactgacgtatcatgctgctacgcactttagtaccaggctctctggtggccagttctttgcaggataacgtggaataatgcttatgtaaaatatgacttccaagactaattctcaacttcagactccccactcccagcattattgctttggcattagtaatgttagtcagaaatatgagtaattcttggcaagaatgggaagcattcaacttgtaacttcaaaaagacattatctgaaaggttgaaagccagtttctaatagtacctggtatcttggcttcagggctcacagcaatcctgtggagaaagtatgagtttcccatttcaacaaagaaggtgaggcttagagggaaaggaagttgctcaagatttgctctggaacagagccaggattcccactcagatcttcgactctgaatcctgcaggccttcacctgtgcgagcactgagcgcctggctgccagctccagagctcctctggggccttggtcagtgtggtgttgtttatgtccagcacactttccgttggtctactggaggacagttcctgtacaggcagatgacttccttcaccaaggacctgtgactctctccctgagggctttctctgacatcatctgcacatggacagcttagactgaaagtttcaggggttcgatgccttccagaggcacctctctaacaataagagcccagattgagtggaaataccccagcttccttaccactccagcctccatgcccttagtggcatgattccgaggtgcatcctacactgactcttggtggctccctggccagagctcattcgcgtggccctcagcagctctcctccttccctggctgtcttcctcaccacctctccgtgattccaggaatcagctcccgaataaacgacttgcacccgaatccttgtctcagggtctgcttctgggggcacaccgaggaagacagcaatcccgtcctaaggttttgcacatctgagccagagggaccccctgggaccgggtctcagggctgagttttggaggagtgggagacactcagggtgcggcttgaggagggatgaggtgagactttgaggtcggcagatggcatttctggcaggcgcctagcatggaaggtgtgagaggaagagggaggttggggacagtggacatcctt

SEQ ID NO: 3941 - DNA, 717 bp, Homo sapiens
tgtcatgtagcctctggaagctctaccatattcttgagaaaggatgaaagtaagaaaaacaaatgatgtcttcatattattgtaaaatagtttcgacctcacagtcctcctgaaaagatcttagcgccccctggagtccccaggctacatctgatgaatcactggtctagggagccatcagttttaaatgagtttaaattgtcttaaatatgcttattacactttctttatttgatgcaccttgtagaacctaaaattagatttcaggagctgctgacgctttgaatgaagtaagagatatcagaggttaacaattcaagagccatgaattctcattttgatccattaaatccttctacctttgcagcatgagtctagaagccctgattcagtccttgttaaaaagctggaaataggccgggcgtggtggctcacacttgtaattccaacactttgggaggccgaggcgggcagattacctgaggtcaggagttcgagaccagcctagccaacatggtgaaaccccgtctctactaaaaattaagaaaaaaaaaattagctgggcatggtgcatacgcctggaatcccagctactcaggaggctgtggcaggagaattgcttgagcctgggagacggagtttgcagtgagctgagattgtaccactgccctctagcctggccaacagagcaagactctatctcaaaaaaaaaaaaaa

SEQ ID NO: 3942 - DNA, 1581 bp, Homo sapiens
tttttaaaaataaaaaaagtaaattttaatgaagttatcttacaaaaaaatgtacaaatcatgaccgtgcatagtgcttgatgaattttcacaaagtaaacatatccatgtaaccaggacaaggttctaaggtcttctactggagttttcatgaagtagggaaataggaagagccaattccatcccagggaactatgttctttagccgtagccccacaaaagaggggtcttcaaagccacataaagtatatcacgtatgacatatatctttccctttcttcctctttcatgtagctgaaattgaaagatgaggctctgcttgcagagatccacacactacaggaaacagttggctttggaaatccatctttctgatacccctccagctgaacaattttctgcatgggactctgagttcctttccttcccagagagttttaccgtatgaagcctggagctggagaacgaaagaatcttcactataaacagagacccattcatttatttccattggctgtgttactggatgttttactggttgacgagaaactgggtcacaataaaaaaatggagatatgaaactcaaaattcatcagcatggttctggagttaacgtatactgagttacatgtaggtatttagttatataaataactatagtgtaattgctataataattatatggcatatatatacatacaataaaattaaggtatagtggggtcattattagggtttctgatgaaagcttattggatcactcctggaggaagtcaggtgctaaggtttctggacaggttcagttaactgaaatacaggaattaaggcatcattttcaaaggtggccctggaggaagactgctatgctgggtcactgtattagggcaaagagcatgctagccctttggaactaacagtaaacgaaaaagctgaacagagaggtctttgctgaaggtggagctattgacaccttctcaccaaacacaggcatcttcatggatctaaaccactagggctccaaggagacaccgttaccctcatcaccgaggtcatattctagggctacagataaaaaaaaaaaaaatcatacttcacctctgccctggatcacagcacggcaaaagcaggaataacccctccttttttttttaaggtgtgactgcctcgataggggtgggacgacaacaggagaaaaggtgagaggtaaattaattttggttaacgagaaggataaagtaaaatctagtcacttacaatccttctcctagtctcggccctgacactacctcctctgtgaagtcttccttagcaagcactaggtttgccttctctgctcgctgtccttgcgctgagtactactgatcgcgctagtttctctgctgtcatctcacggtctccccagcggactgtgagctccacgaggaaagaacagcgccctttagtatttgcgttctcagcgttgcgcctcggcaccaacgcttgcaagatggatggcttttgtagcactttccttggcgcgcctgggattcgcctaaaacttctgactccagcagggactcacaagtctgagagggatcgcac

SEQ ID NO: 3943 - DNA, 1580 bp, Homo sapiens
tttttaaaaataaaaaaagtaaattttaatgaagttatcttacaaaaaaatgtacaaatcatgaccgtgcatagtgcttgatgaattttcacaaagtaaacatatccatgtaaccaggacaaggttctaaggtcttctactggagttttcatgaagtagggaaataggaagagccaattccatcccagggaactatgttctttagccgtagccccacaaaagaggggtcttcaaagccacataaagtatatcacgtatgacatatatctttccctttcttcctctttcatgtagctgaaattgaaagatgaggctctgcttgcagagatccacacactacaggaaacagttggctttggaaatccatctttctgatacccctccagctgaacaattttctgcatgggactctgagttcctttccttcccagagagttttaccgtatgaagcctggagctggagaacgaaagaatcttcactataaacagagacccattcatttatttccattggctgtgttactggatgttttactggttgacgagaaactgggtcacaataaaaaaatggagatatgaaactcaaaattcatcagcatggttctggagttaacgtatactgagttacatgtaggtatttagttatataaataactatagtgtaattgctataataattatatggcatatatatacatacaataaaattaaggtatagggggtcattattagggtttctgatgaaagcttattggatcactcctggaggaagtcaggtgctaaggtttctggacaggttcagttaactgaaatacaggaattaaggcatcattttcaaaggtggccctggaggaagactgctatgctgggtcactgtattagggcaaagagcatgctagccctttggaactaacagtaaacgaaaaagctgaacagagaggtctttgctgaaggtggagctattgacaccttctcaccaaacacaggcatcttcatggatctaaaccactagggctccaaggagacaccgttaccctcatcaccgaggtcatattctagggctacagataaaaaaaaaaaaaatcatacttcacctctgccctggatcacagcacggcaaaagcaggaataacccctccttttttttttaaggtgtgactgcctcgataggggtgggacgacaacaggagaaaaggtgagaggtaaattaattttggttaacgagaaggataaagtaaaatctagtcacttacaatccttctcctagtctcggccctgacactacctcctctgtgaagtcttccttagcaagcactaggtttgccttctctgctcgctgtccttgcgctgagtactactgatcgcgctagtttctctgctgtcatctcacggtctccccagcggactgtgagctccacgaggaaagaacagcgccctttagtatttgcgttctcagcgttgcgcctcggcaccaacgcttgcaagatggatggcttttgtagcactttccttggcgcgcctgggattcgcctaaaacttctgactccagcagggactcacaagtctgagagggatcgcac

SEQ ID NO: 3944 - DNA, 9877 bp, Homo sapiens
  SITE (7341): n equals a,t,g, or c
  SITE (7354): n equals a,t,g, or c
ggcaagcggaggaggcgtggcgagcggatcatccgcttccggagtcgaggttttcgggcttgtaccgcttggcggtgcggcctggtgtcggcttgcaggttctttctgtgtttgttctctgccctgccaaggccgtagagctggtgcgtgcgggtagcggggctctccgaggagccgcacgccggcggcaccatggtccacctcagtgagtcatcgggccaccgcgagacgttccgggcggtcacggggctcgggagttcggggccgggtggggagagctctcccaggcgcgatggaggcaacccgaacctgaagcagccacactgccttacatttgatccttctctcagttttttccccacttaatcaccgctgaaaaatttccaccccattgaagcagctaaggctccgacaaggtcacagagcctagtgaatggcaagcccatgcggggtgggtttgggtatgaggaggaggtcattgctggctggactggccaagaggggtttcacaaagaagagtagcatctaaactggattgacaggaatggattggaagtgagacatttcagtgggaaaagggaattgtgccgtctgtgtcattttgtcctttttgtgctgttttttgtgtcctaaccagctgcttttctacagctactctcctctgcaaggcctaccgtgggggccacttaaccatccgccttgccctgggtggctgcaccaatcggccgttctaccgcattgtggctgctcacaacaagtgtcccagggatggccgtttcgtagagcagctgggctcctatgatccattgcccaacagtcatggagaaaaactcgttgccctcaacctagacaggatccgtcattggattggctgcggggcccacctctctaagcctatggaaaagcttctgggtaactcagctctggtcttaccttattgaggggattttaaactgaagtcagctccaggacagtaggtgtaagaatgattttcggctgggcacggtggctcacgcctgtaatctcagcgctttgggaggccgaggcgggcggatcacctgaggtcaagagtttgagaccagagtggccaacatggtgaaacgctgtctctactaaaaataaaaaaaaaaaattagttgggcgtggtgacacgcacctgtagtctcagctactggggaggctgaggcaggagaatcgcttgaacccaggaggcggaggttgcagtgagccaagatcgcgtcactgcactccagtctgggcaacagagggcgattccatctcaaagaaaaaaaaaaaagagttatttcattccctctaggctgttcaggactgaagtgggagctgaagttgtgatctaattggcattttgaatctggaggccccttttgtggactcctttgtaagactttgggtgactggtattttatgctaaaaataggaatagtatgttttgaatggccatctgtcagtttacgttttttaaagtaaggggaatattgttagggaagtagacatccactgtctccttgccggggagaagtagtacagagtttggcaagtgaggagcatggtttgcatccatgcactgggtcagatctcagacctcagttctgtgagacagagttcctagggaagcattggcttatactgtgttataataagtgaaaaatctgttacttttaggtcttgctggctttttccctctgcatcctatgatgatcacaaatgctgagagactgcgaaggaaacgggcacgtgaagtcctgttagcttctcagaaaacagatgcagaagctacagatacagaggctacagaaacataaatgagctgactttagtgagcatagcagtgggaacaaggtcaaggtccttttgaaacactgcagcgatcttaattttgttagatttggagttcaataaatggagtatcctgagttgcccttgctcttctggcctggcctgcacagggcccagggagagatttgttcttgtgtgacttagagctgggtgtgggtactaattagcttttttcgactttgtcttgggatagacagtggctatgggaggattggacttttgagttgggctctgggtctcttggacaactttacaatttactggcttccaagacttcctgcttcaaaacccccagccagactattcatggcccattcagatcttcatgttcatcccacaagtgcaagaacagttaacctttcttaattgatttttgtaattggaggtttatattgtcttgcctaatgcatattctctttttttttttttttttgagacggagtcttgttctgttgccaggctggagtgcggtggtgcaatctcagctcactgcaatctccacctcctgggttcaagaggttctcctgcctcagcctcctgagtagccggggagctacaagcatgcaccaccacacccagctaattttttttttttttttgagaggagtctcgctctgtcgcccaggcttgagtgcagtggcgcgatctcggctcactgcaagctctgtctcctgggttcatgccattctcctgcttcagcctcccgagtagtcccaggagtagctgggactacaggtgcccaccaccacacccagctaatttttttgtatttttagtagagatggggtttcaccatgttatccaggatggttttgatctcctgacctcgtgatccgcccgccttggcctcccaaaagtgctgggattataggcgtgagccaccgcccgggcaaatttttgtatttttagtagagatggggtttcaccgtgttggccaggatggtctcaatctgaccttgtgatctgcccacctcggcctcccaaagtgctaggattactggcgtgagccaccactcctagccttaatgcatattcttaaatatacaaaggtagatttgttatgaaaattgctttggggctctaataacctaccttttaagaatgagaaactgctgggcttaagggagttcagtatgaatcaagattgaaccattcaaatgtggctgtgatttctgcatatatcatagatgggatccttctgagaatactggaatagggaattaggacaccaagccaattcagctgtgaaccttattcttgtacttttctttcttgctggtaattttatggagcaggttaagaaggctgctctgtgttaggataaactgtataccaataatgttgacaacctgtaatgagtgttgcattttacttcttgtatcttttccttcctaccttgatgccagtaatctataagggatctttatagtttgaatgtatttgaataacttcagtatactttagttctacttttttatttgactcacaaccattcttaggtctcaagtattcccatgtgttttaaaagcctgaagtcagtgagatgaaattcaacatcaagaatttgaagtaacttgtaaggaaaaataatataaagataccattggggcagtggctcacacctgtaatctcagcactttgggaggctgaggtggaaggatcacttgaagccagagtttgagaccagcctgtgcaacacagcaagaccccgtctctacaaaaacttaaaaaattagctggctgtggtgttgctcacccatagttccagctactcgggaagctgaggcagtaagatcacttgagcccaggaggccgatgctgcagtgaactgtgattgttccactacagtccagcctgggtgacagagaaaagaaaaagaaaacattacataatttggctagagcataataatttgattttctggtttttgaaaatttgagttgcaataaaaggatatttcagtgtgcgatttcaattttccgtagcaaatgtatatatagaaaaatgttaaaatagatgtatttgaataccttaaaaaatacaagaaactggaagaaagataatattgcaaagcatctacatatatcctaggccttttgtgtacaaggttatttgtgacaattgtaaggtattatgaaggcaggtaggattatctccgttttacagatagggaagctgaggcctagaggtggaaacttgcccagtgatgtaagattcatctcccggttatgccctcctggaaagcccttcccaacatattatgttgtccatagagggaaaaatgagcaaagacagatggcttaactctggtgtgtgactaagatataggaaatttatagaggaggttctatcaatgtgccgacttactttgtgttttatgttctgagaacgattaccagccatctcaaattctgtggttgtcaaagctcccctggggttgttgctggttggcccccacttgctttgagactttgatgccagggcaggttgagaggaactgacttcagctgagtttgatcttggatctgggaaagagaaatgctttgaaaatcacggcaactctgggaagtttaaaagatattaatgtatcctggagagtttgaggctttgcagaaacttattggcagagcagaatgattctgaaaaatgctacatcagtgaggggatatttgataaggtattttctgccaactcgggtattcacttagcattgtttatcctttaagatatgtatacacatacttcctctgtgagtttaccctactaacaaagttttatccccagcctcaaccttgctttgggtctccaggcccaagtttctcaccatctcttggatgattgctccagcccactctgctgccacctgggatccaacatgttcaaacccagctgtgaacttcacagagtattaaaagaaagagcctttgcttcagcagtttatgttattaagacggaggcttgggtcatgttatctctctccaccaatgtgtaaggtgaaagtcctattaggtaagagtttttggaagacccgtgttttgtgctttttgggtttcagtatagggttttttcctacagggctagagggaaagtaccccagcatttccaaccagtggggtgcaaaattatttgggtctacagctttacctattcctttcaagaacatttttgaaaaaacacatctgttaagttgaaccatgtgtaactgctgaatgctgatgtttggccgttttctacttaaaaaaataggccagcagtttgtaaattcaagctaatatatgaactttttgaaaaagttgttcttggacactaaaaggtaagacggacgccagatttccagagcaaggggaggagagacccgagcaacatcacttccctgaagacctagctcctgcgcgcggccggggactgtgactccacatgccggcgttacttacccgggcccgcgcctgactcgccacacctcattttgcggccgccgtaaagcgcggatgcgcggcgtggccacgccccttcagtgcttgtgacgcaggcgccctgggctttttgggcgcgaaaaagaagcagtcctgggttgtacccggcgcagctgggagcggctgcttcctccggggtcgtatctccgcccggcatggggctgctggacctttgcgaggaagtgttcggcaccgccgacctttaccgggtgctgggcgtgcgacgcgaggcctccgacggcgaggtccgacgaggctaccacaaggtgtccctgcaggtacacccggaccgggtgggtgagggcgacaaggaggacgccacccgccgcttccaggtatgcagggtcccgccccgaagccgaccggctgcgcgggcctccccctagccttttggctaccgggccccgccccgggggagcgcgctgagctccgcttggcgccttctgatctttatttctcgcgccgccgtttcggtgggaggagcaggggtgatttacggatactctttgccctcagatcctgggaaaagtctattccgttctcagtgacagagaacagagagcagtgtacgatgagcagggaacagtggacgaggactctcctgtgctcacccaagaccgagactgggaggcgtattggcggctactctttaaaaaggtaaaggactctggaggtttctttgtgactgttaccatcattcaatcaacaaacctttattgactgcctctaagatcttgtattttgtgttaattttgtaggaattaggaattttgagtttggccttgaaatacagatacacgcacgcttactgaaacgggctttaaatttcctgttaatgtgattgttgcactgaaaagggccgatttattttttttgccggatgcgctttattttacatatccaaatgtaagtcctgattccggatcacctctcactcttggaaatttcacttaaatttcccttccctggtccctagttagcagttaatgaagattggatttaaaaaggaggactccggagaagcttaggcatagaaaatctggttcaataatttcaactcaagcaactgttgtattgcagcaattcaacacccaactctagttttactaacgtacgttttatttaaagtaaaattcccaaagttaaagcaaatctcctttatcatcagatatctttagaggacattcaagcttttgaaaagacatacaaaggttcggaagaagagctggctgatattaagcaggcctatctggacttcaagggtgacatggatcagatcatggagtctgtgctttgcgtgcagtacacagaggaacccaggataaggaatatcattcagcaagctattgacgccggagaggtcccatcctataatgcctttgtcaaagaatcgaaacaaaagatgaatgcaaggaaaaggagggtaagattttgaatactgtggatttatattttgactgcttccaaaaaggatttgagagtatttacagcagtagaagtaaacataaaactccagaaataaggactagggttaacttggtctatagtttcgatctaataaatgggcataccagttcatcaagagaaactttttctagcatgttgtgctcaagatgatttttattgcatagattgtttaaatattaccatagtaaagtagcactgaaatattttttcatgtaggccaattcttgtagcattcctgaggcattcctcagggagaataaagttagtggggaacccgggtacacaggatgggcagtgatccttactcggttgagggggtaagaagagaatggcagacaccgtcttgttaaaagtgcagatgtttgggcctttgccccgaatttgattcttgagttggatacagaatttttcttttcttttttttttttttaaagaaaaactttagcttagcggtccccagcctttttgataccaggtacctgttttgtggaagacagtttttccagtgacagtgggggtgaggagagttgggggggtggttcangatgaaaccttanatcatcgggcgttagattctcttaaggagcacacaacttttaggaccactgctgccttcctgagtgccctcaggaacttttctgcagcttttacataagagacgctggcagagagaaagctgacctttttgtttccggtgaaaatttgaagggcctggtttgcctagataagaggctgcaccctttctggagagcttgaggggaacggggggagcgatatcaagaccattttggttcataggctacatctgctaagactcaagctgacaattatcttaagtcgttcatcatttcctgagatgaaactgagcacagctgcattcacagtagactgttagcttgagaaacttccctagaatttgaggagaaaatggcatagttttgatagactgttcaacaaaccttagggggatgctgaatttaaagagagaatttgaatacaaggaaacggtgtcttattgggatagggggtcctaatgtatcatcatcctcagtattaatagcattaattgctacttagaaaattcacaaggggtgttggggcctcttatagttgttgccctaaggtgttcttgtgatattttgtaaacaatgctctaggaacacttggcaaaggaaggctgctttgaaattaggtaaatagatgttaaaactgagtttattgatgttggttcttctgactactggggagaagtcattttaaactggggttgttcacaaggcaccaccagtcccatggagtaaattgggtttccaggagagaaattggaaatacctgtatcctggcaattgcatcatttgccttttttttttttttttctcttttttctaagagatggcatctccatcacccaggctggagtgcagaggcatgatcacagcttattgcagcctgaactctcagactgaagccatcttcccacctcagcctccctagtagctgggactacaagcacatgccaccacaccaggctcatttcttttcttttttatagaactgaggtctcactatgttacccaggcaggtcttgaactcctgagttcaagtgatcctcccaccttggcctcccaaggtatggggattacagttgtgagccaccatacccggcctcatgttcctttttatcatcatgtgatttatgagtgccagagtacttactacctctagcaaatagaattgggtaaaaaacaaatggtaattggaatcagaggatctactgcttgctgtcagcattgttgccatttaatgaatgacatagttatgtaattcgattcattttgtctattcatatattcataaaattgaaacagaattatagatttgcttttgggaaagagtatgtattttaagcatttcctggtggccctgagtctcatgtgagttcctgtttcaggctcaggaagaggccaaagaagcagaaatgagcagaaaggagttggggcttgatgaaggcgtggatagcctgaaggcagccattcaggtaaacttggcagtttgttgccacatctttaatgatctgattcctactgctaatattttctttggaatgttgtattttgttttcttcttttaagacataaccgcataccttctatttgtccttttaaagtgtacaatttggtggttttaagtgtatttacaaagttttacaattattaacaccaattgtaggacattttcaccattccaaaaaaactccatacccattagtagttattccacttttccagcccctggcaaccactaggtactttctgtctatggataatgttgtgaaagcttgtgttttaacttctcaaacagagcagacaaaaggatcggcaaaaggaaatggacaattttctggctcagatggaagcaaagtactgcaaatcttccaaaggaggagggaaaaaatctgctctcaagaaagaaaagaaataatggaatttttctcttcaaaggtccttaggtgtaaattgatgccatcgtaggcaaggtgcaggcaggatttgaaggcaaaagtcaattcagctcttgagaaaaggtgtctttccagcctgaatttttcagattgactagaccaagcagaatctctcaacctgatcttagtatttcctagaaagcacttgacattgtgtgaggtctcacctgaaggaacttggtggtgacatttgggagggtggagggaggcagtgtccttcctgacagcacttgcctccatggatcttctgtacacagaactcttatctaggatgtggttctgttcatgctgctttctgcgatgtgcgtgtctgttagaataggctctctacccagctagaacaccttccaaacacttgctggacagctatcttccacatactttccagtttaacattggtcttaatgatcttgaatagaatcctctcttcattttactccacccagtttgtgaactgatggtacagggttaaattaccttgaaacatttttgtgaagaaggtgtttataattcaattaaaaaagggagaaacatgattgattaaggttttggggccttt

SEQ ID NO: 3945 - DNA, 5156 bp, Homo sapiens
ggcaagcggaggaggcgtggcgagcggatcatccgcttccggagtcgaggttttcgggcttgtaccgcttggcggtgcggcctggtgtcggcttgcaggttctttctgtgtttgttctctgccctgccaaggccgtagagctggtgcgtgcgggtagcggggctctccgaggagccgcacgccggcggcaccatggtccacctcagtgagtcatcgggccaccgcgagacgttccgggcggtcacggggctcgggagttcggggccgggtggggagagctctcccaggcgcgatggaggcaacccgaacctgaagcagccacactgccttacatttgatccttctctcagttttttccccacttaatcaccgctgaaaaatttccaccccattgaagcagctaaggctccgacaaggtcacagagcctagtgaatggcaagcccatgcggggtgggtttgggtatgaggaggaggtcattgctggctggactggccaagaggggtttcacaaagaagagtagcatctaaactggattgacaggaatggattggaagtgagacatttcagtgggaaaagggaattgtgccgtctgtgtcattttgtcctttttgtgctgttttttgtgtcctaaccagctgcttttctacagctactctcctctgcaaggcctaccgtgggggccacttaaccatccgccttgccctgggtggctgcaccaatcggccgttctaccgcattgtggctgctcacaacaagtgtcccagggatggccgtttcgtagagcagctgggctcctatgatccattgcccaacagtcatggagaaaaactcgttgccctcaacctagacaggatccgtcattggattggctgcggggcccacctctctaagcctatggaaaagcttctgggtaactcagctctggtcttaccttattgaggggattttaaactgaagtcagctccaggacagtaggtgtaagaatgattttcggctgggcacggtggctcacgcctgtaatctcagcgctttgggaggccgaggcgggcggatcacctgaggtcaagagtttgagaccagagtggccaacatggtgaaacgctgtctctactaaaaataaaaaaaaaaaattagttgggcgtggtgacacgcacctgtagtctcagctactggggaggctgaggcaggagaatcgcttgaacccaggaggcggaggttgcagtgagccaagatcgcgtcactgcactccagtctgggcaacagagggcgattccatctcaaagaaaaaaaaaaaagagttatttcattccctctaggctgttcaggactgaagtgggagctgaagttgtgatctaattggcattttgaatctggaggccccttttgtggactcctttgtaagactttgggtgactggtattttatgctaaaaataggaatagtatgttttgaatggccatctgtcagtttacgttttttaaagtaaggggaatattgttagggaagtagacatccactgtctccttgccggggagaagtagtacagagtttggcaagtgaggagcatggtttgcatccatgcactgggtcagatctcagacctcagttctgtgagacagagttcctagggaagcattggcttatactgtgttataataagtgaaaaatctgttacttttaggtcttgctggctttttccctctgcatcctatgatgatcacaaatgctgagagactgcgaaggaaacgggcacgtgaagtcctgttagcttctcagaaaacagatgcagaagctacagatacagaggctacagaaacataaatgagctgactttagtgagcatagcagtgggaacaaggtcaaggtccttttgaaacactgcagcgatcttaattttgttagatttggagttcaataaatggagtatcctgagttgcccttgctcttctggcctggcctgcacagggcccagggagagatttgttcttgtgtgacttagagctgggtgtgggtactaattagcttttttcgactttgtcttgggatagacagtggctatgggaggattggacttttgagttgggctctgggtctcttggacaactttacaatttactggcttccaagacttcctgcttcaaaacccccagccagactattcatggcccattcagatcttcatgttcatcccacaagtgcaagaacagttaacctttcttaattgatttttgtaattggaggtttatattgtcttgcctaatgcatattctctttttttttttttttttgagacggagtcttgttctgttgccaggctggagtgcggtggtgcaatctcagctcactgcaatctccacctcctgggttcaagaggttctcctgcctcagcctcctgagtagccggggagctacaagcatgcaccaccacacccagctaattttttttttttttttgagaggagtctcgctctgtcgcccaggcttgagtgcagtggcgcgatctcggctcactgcaagctctgtctcctgggttcatgccattctcctgcttcagcctcccgagtagtcccaggagtagctgggactacaggtgcccaccaccacacccagctaatttttttgtatttttagtagagatggggtttcaccatgttatccaggatggttttgatctcctgacctcgtgatccgcccgccttggcctcccaaaagtgctgggattataggcgtgagccaccgcccgggcaaatttttgtatttttagtagagatggggtttcaccgtgttggccaggatggtctcaatctgaccttgtgatctgcccacctcggcctcccaaagtgctaggattactggcgtgagccaccactcctagccttaatgcatattcttaaatatacaaaggtagatttgttatgaaaattgctttggggctctaataacctaccttttaagaatgagaaactgctgggcttaagggagttcagtatgaatcaagattgaaccattcaaatgtggctgtgatttctgcatatatcatagatgggatccttctgagaatactggaatagggaattaggacaccaagccaattcagctgtgaaccttattcttgtacttttctttcttgctggtaattttatggagcaggttaagaaggctgctctgtgttaggataaactgtataccaataatgttgacaacctgtaatgagtgttgcattttacttcttgtatcttttccttcctaccttgatgccagtaatctataagggatctttatagtttgaatgtatttgaataacttcagtatactttagttctacttttttatttgactcacaaccattcttaggtctcaagtattcccatgtgttttaaaagcctgaagtcagtgagatgaaattcaacatcaagaatttgaagtaacttgtaaggaaaaataatataaagataccattggggcagtggctcacacctgtaatctcagcactttgggaggctgaggtggaaggatcacttgaagccagagtttgagaccagcctgtgcaacacagcaagaccccgtctctacaaaaacttaaaaaattagctggctgtggtgttgctcacccatagttccagctactcgggaagctgaggcagtaagatcacttgagcccaggaggccgatgctgcagtgaactgtgattgttccactacagtccagcctgggtgacagagaaaagaaaaagaaaacattacataatttggctagagcataataatttgattttctggtttttgaaaatttgagttgcaataaaaggatatttcagtgtgcgatttcaattttccgtagcaaatgtatatatagaaaaatgttaaaatagatgtatttgaataccttaaaaaatacaagaaactggaagaaagataatattgcaaagcatctacatatatcctaggccttttgtgtacaaggttatttgtgacaattgtaaggtattatgaaggcaggtaggattatctccgttttacagatagggaagctgaggcctagaggtggaaacttgcccagtgatgtaagattcatctcccggttatgccctcctggaaagcccttcccaacatattatgttgtccatagagggaaaaatgagcaaagacagatggcttaactctggtgtgtgactaagatataggaaatttatagaggaggttctatcaatgtgccgacttactttgtgttttatgttctgagaacgattaccagccatctcaaattctgtggttgtcaaagctcccctggggttgttgctggttggcccccacttgctttgagactttgatgccagggcaggttgagaggaactgacttcagctgagtttgatcttggatctgggaaagagaaatgctttgaaaatcacggcaactctgggaagtttaaaagatattaatgtatcctggagagtttgaggctttgcagaaacttattggcagagcagaatgattctgaaaaatgctacatcagtgaggggatatttgataaggtattttctgccaactcgggtattcacttagcattgtttatcctttaagatatgtatacacatacttcctctgtgagtttaccctactaacaaagttttatccccagcctcaaccttgctttgggtctccaggcccaagtttctcaccatctcttggatgattgctccagcccactctgctgccacctgggatccaacatgttcaaacccagctgtgaacttcacagagtattaaaagaaagagcctttgcttcagcagtttatgttattaagacggaggcttgggtcatgttatctctctccaccaatgtgtaaggtgaaagtcctattaggtaagagtttttggaagacccgtgttttgtgctttttgggtttcagtatagggttttttcctacagggctagagggaaagtaccccagcatttccaaccagtggggtgcaaaattatttgggtctacagctttacctattcctttcaagaacatttttgaaaaaacacatctgttaagttgaaccatgtgtaactgctgaatgctgatgtttggccgttttctacttaaaaaaataggccagcagtttgtaaattcaagctaatatatgaactttttgaaaaagttgttc

SEQ ID NO: 3946 - DNA, 102 bp, Homo sapiens
gaggcggaggttgcggtgagccgagatcgggccattgcactccagcctgggcaacaagagcgaaactccatctcaaaaaaaaaaaaaaaaaaaaaaaaaaaa

SEQ ID NO: 3947 - DNA, 34 bp, Homo sapiens
aagagcaaaactccatctcaaaaaaaaaaaaaaa

SEQ ID NO: 3948 - DNA, 2095 bp, Homo sapiens
cacaggttggcacaccagaacggggcagtgccaggatggaaaccggaagttagcaaaaggatgtcctctctcccaaaggccttctgcgtttaagcaatgcttgttgaaaaaatgttagcctgtggttatgatcttatgcacaaagataactggaggattcagcaccgatgcagtcgtggtgaacaggaggtctacctaacgcacagaaagtcatgcttcagtgacattgtcaacaggagtccaattatgggcagaatctgctctctgtgaccaaaagaggatgtgcactgcttcacgtgacagtggtgaccttgcaatatagaaaaacttgggagttattgaacatcccctgggcttacaagaaacactgatgaatgtaaaatcaggggacatttgaagatggcagaactgtctcccccttgtcacctacctctgatagaatgtctttaatggtatcataatcattttcacccataatacacagtagcttcttcttactgtttgtaaatacattctcccttggtatgtcactttatatcccctggttctattaaaatatccatatatatttctataaaaaaagtgtttgaccaaagtaggtctgcagctatttcaacttccttccgtttccagaaagagctgtggatattttactggaaattaagaacttgctgctgttttaataagatgtagtatattttctgactacaggagataaaatttcagtcaaaaaaccattttgacagcaagtatcttctgagaaattttgaaaagtaaatagatctcagtgtatctagtcacttaaatacatacacgggttcatttacttaaacctttgactgcctgtatttttttcaggtagctagccaaattaatgcataatttcagatgtagaagtagggtttgcgtgtgtgtgtgtgatcatactcaagagtctaaaaactagtttccttgtgttggaaatttaaaaggaaaaaaatcgtatttcactgtgttttcaatttatattttcacaactactttctctctccagagctttcatctgatatctcacaatgtatgatatacgtacaaaacacacagcaagttttctatcatgtccaacacattcaacactggtatacctcctaccagcaagcctttaaaatgcatttgtgtttgcttatttgttttgttcaagggttcagtaagacctacaatgttttgtatttcttgacttattttattagaaacattaaagatcacttggtagttagccacattgagaagtggttatcattgttaatgtggttaatgccaaaaagtggttaatattaataagactgtttccacaccataggcaataatttcttaatttaaaaaatctaagtatattcctattgtactaaatatttttcccaactggaaagcacttgattgtacccgtaagtgtttgagtgatgacatgtgatgattttcagaaagttgttgtttttgtttccatagcctgtttaagtaggttgtaagtttgaatagttagacatggaaattattttataagcacacactctaaagatatctttttagatgataaaatgtacacccccccatcaccaacctcacaacttagaaaaatctaagttgtttgatttctttgggatttcttttgttgtgaaacactgcaaagccaatttttctttataaaaattcatagtaatcctgccaaatgtgcctattgttaaagatttgcatgtgaagatcttagggaaccactgtttgagttctacaagctcatgagagtttatttttattataagatgtttttaatataaaagaattatgtaactgatcactatattacatcatttcagtgggccaggaaaatagatgtcttgctgttttcagtattttcttaagaaattgcttttaaaacaaataattgttttacaaaaccaataattatcctttgaattttcatagactgactttgcttttgacgtaaaaattttttttctcaataaattatcactttgagaaatgaggcctgtacaaggctgataacctatatgtgatggagatcacccaatgccaagggcagaaagcaaacctagttaaa

SEQ ID NO: 3949 - DNA, 2712 bp, Homo sapiens
cacaggttggcacaccagaacggtgcagtgccaggatggaaaccggaagttagcaaaaggatgtcctctctcccaaaggccttctgcgtttaagcaatgcttgttgaagaaatgttagcctgtggttatgatcttatgcacaaagataactggaggattcagcaccgatgcagtcgtggtgaacaggaggtctacctaacgcacagaaagtcatgcttcagtgacattgtcaacaggagtccaattatgggcagaatctgctctctgtgaccaaaagaggatgtgcactgcttcacgtgacagtggtgaccttgcaatatagaaaaacttgggagttattgaacatcccctgggattacaagaaacactgatgaatgtaaaatcaggggacatttgaagatggcagaactgtctcccccttgtcacctacctctgatagaatgtctttaatggtatcataatcattttcacccataatacacagtagcttcttcttactgtttgtaaatacattctcccttggtatgtcactttatatcccctggttctattaaaatatccatatatatttctataaaaaaagtgtttgaccaaagtaggtctgcagctatttcaacttccttccgtttccagaaagagctgtggatattttactggaaattaagaacttgctgctgttttaataagatgtagtatattttctgactacaggagataaaatttcagtcaaaaaaccattttgacagcaagtatcttctgagaaattttgaaaagtaaatagatctcagtgtatctagtcacttaaatacatacacgggttcatttacttaaaacctttgactgcctgtatttttttcaggtagctagccaaattaatgcataatttcagatgtagaagtagggtttgcgtgtgtgtgtgtgatcatactcaagagtctaaaaactagtttccttgtgttggaaatttaaaaggaaaaaaatcgtatttcactgtgttttcaatttatattttcacaactactttctctctccagagctttcatctgatatctcacaatgtatgatatacgtacaaaacacacagcaagttttctatcatgtccaacacattcaacactggtatacctcctaccagcaagcctttaaaatgcgtttgtgtttgcttatttgttttgttcaagggttcagtaagacctacaatgttttgtatttcttgacttattttattagaaacattaaagatcacttggtagttagccacattgagaagtggttatcattgttaatgtggttaatgccaaaaagtggttaatattaataagactgtttccacaccataggcaataatttcttaatttaaaaaatctaagtatattcctattgtactaaatatttttcccaactggaaagcacttgattgtacccgtaagtgtttgagtgatgacatgtgatgattttcagaaagttgttgtttttgtttccatagcctgtttaagtaggttgtaagtttgaatagttagacatggaaattattttataagcacacacctaaagatatctttttagatgataaaatgtacacccccccatcaccaacctcacaacttagaaaatctaagttgtttgatttcattgggatttcttttgttgtgaaacactgcaaagccaatttttctttataaaaattcatagtaatcctgccaaatgtgcctattgttaaagatttgcatgtgaagatcttagggaaccactgtttgagttctacaagctcatgagagtttatttttattataagatgtttttaatataaaagaattatgtaactgatcactatattacatcatttcagtgggccaggaaaatagatgtcttgctgttttcagtattttcttaagaaattgcttttaaaacaaataattgttttacaaaaccaataattatcctttgaattttcatagactgactttgctttcgacgtagaaattttttttcttaataaattatcactttgagaaatgaggcctgtacaaggctgataacctatatgtgatggagatcacccaatgccaagggcagaaagcaaacctagttaaataggtgagaaaaaaaataataatcccagtgccatttgtctgtgcaaagagaattaggagagaggttaatgttacttttttccattttggaaataattttaatcaagtaactcaaatgtgacaaaatttatttttattttttgtggttatattcccaacaacattaaaaaatactcgaggcataaatgtagttgtctcctactctgcttctcttactatactcatacatttttaatatggtttatcaatgattcatgtttccctcaaatagtgatggtttacacctgtcatggaaacaatcctagagagctcagagcaattaaaccactattccatgcttttaagtagttttctccacctttttcttatgagtctcactagattgactgaggaatgtatgtctaaattcctggagaagatgatatggattggaaactgaaattcagagaaatggagtgttcaatagataccacgaattgtgaacaaagggaaaattctatacaactcaatctaagtcagtccactttgacttcgtactgtctttcacctttccattgttgcatcttgaattttttaaaatgtctagaattcaggatgctaggggctacttctttaaaaa

SEQ ID NO: 3950 - DNA, 2711 bp, Homo sapiens
cacaggttggcacaccagaacggtgcagtgccaggatggaaaccggaagttagcaaaaggatgtcctctctcccaaaggccttctgcgtttaagcaatgcttgttgaagaaatgttagcctgtggttatgatcttatgcacaaagataactggaggattcagcactgatgcagtcgtggtgaacaggaggtctacctaacgcacagaaagtcatgcttcagtgacattgtcaacaggagtccaattatgggcagaatctgctctctgtgaccaaaagaggatgtgcactgcttcacgtgacagtggtgaccttgcaatatagaaaaacttgggagttattgaacatcccctgggcttacaagaaacactgatgaatgtaaaatcaggggacatttgaagatggcagaactgtctcccccttgtcacctacctctgatagaatgtctttaatggtatcataatcattttcacccataatacacagtagcttcttcttactgtttgtaaatacattctcccttggtatgtcactttatatcccctggttctattaaaatatccatatatatttctataaaaaaagtgtttgaccaaagtaggtctgcagctatttcaacttccttccgtttccagaaagagctgtggatattttactggaaattaagaacttgctgctgttttaataagatgtagtatattttctgactacaggagataaaatttcagtcaaaaaaccattttgacagcaagtatcttctgagaaattttgaaaagtaaatagatctcagtgtatctagtcacttaaatacatacacgggttcatttacttaaacctttgactgcctgtatttttttcaggtagctagccaaattaatgcataatttcagatgtagaagtagggtttgcgtgtgtgtgtgtgatcatactcaagagtctaaaaactagtttccttgtgttggaaatttaaaaggaaaaaaatcgtatttcactgtgttttcaatttatattttcacaactactttctctctccagagctttcatctgatatctcacaatgtatgatatacgtacaaaacacacagcaagttttctatcatgtccaacacattcaacactggtatacctcctaccagcaagcctttaaaatgcatttgtgtttgcttatttgttttgttcaagggttcagtaagacctacaatgttttgtatttcttgacttattttattagaaacattaaagatcacttggtagttagccacattgagaagtggttatcattgttaatgtggttaatgccaaaaagtggttaatattaataagactgtttccacaccataggcaataatttcttaatttaaaaaatctaagtatattcctattgtactaaatatttttcccaactggaaagcacttgattgtacccgtaagtgtttgagtgatgacatgtgatgattttcagaaagttgttgtttttgtttccatagcctgtttaagtaggttgtaagtttgaatagttagacatggaaattattttataagcacacacctaaagatatctttttagatgataaaatgtacacccccccatcaccaacctcacaacttagaaaatctaagttgtttgatttctttgggatttcttttgttgtgaaacactgcaaagccaatttttctttataaaaattcatagtaatcctgccaaatgtgcctattgttaaagatttgcatgtgaagatcttagggaaccactgtttgagttctacaagctcatgagagtttatttttattataagatgtttttaatataaaagaattatgtaactgatcactatattacatcatttcagtgggccaggaaaatagatgtcttgctgttttcagtattttcttaagaaattgcttttaaaacaaataattgttttacaaaaccaataattatcctttgaattttcatagactgactttgcttttgacgtagaaattttttttctcaataaattatcactttgagaaatgaggcctgtacaaggctgataacctatatgtgatggagatcacccaatgccaagggcagaaagcaaacctagttaaataggtgagaaaaaaaataataatcccagtgccatttgtctgtgcaaagagaattaggagagaggttaatgttacttttttccattttggaaataattttaatcaagtaactcaaatgtgacaaaatttatttttattttttgtggttatattcccaacaacattaaaaaatactcgaggcataaatgtagttgtctcctactctgcttctcttactatactcatacatttttaatatggtttatcaatgattcatgtttccctcaaatagtgatggtttacacctgtcatggaaacaatcctagagagctcagagcaattaaaccactattccatgcttttaagtagttttctccacctttttcttatgagtctcactagattgactgaggaatgtatgtctaaattcctggagaagatgatatggattggaaactgaaattcagagaaatggagtgttcaatagataccacgaattgtgaacaaagggaaaattctatacaactcaatctaagtcagtccactttgacttcgtactgtctttcacctttccattgttgcatcttgaattttttaaaatgtctagaattcaggatgctaggggctacttctttaaaaa

SEQ ID NO: 3951 - DNA, 509 bp, Homo sapiens
gaaaatgctcaggtttgtaagaatctaatctcacttacataactaagcactccataataagttttattaagtacaaagggagccagaaaaaatgacatttatttcttctagatcagaaaaatttaaattaagccctgccttgctgtttagaaatatgtgggcattgttataatttattcaataaatttatgttcctttgccttcctgtggaaacagttttatcccactaaactaggaattaggggataaatcacaaacaaaaaaaaagttgcagcactgaaaaaaagtaatttattgtttttgcaactggtatgtgaatttgtgtgataaaattatttattcttatttaacaaaaatatgttcaaatttttctatatttaaaatgttttgctgttgtcctactttttaatttatgcttcatgtttgtgtataaagtacacttttacactttgtgagtttacataatatacagcactggttgcttttgtatttttttacagaaagctttc

SEQ ID NO: 3952 - DNA, 463 bp, Homo sapiens
tgaacattcctacttccagtaagggttacactgacgtggtgaggattcctgaaggggcaacccacataaaagttcgacagttcaaagccaaagaccagactagattcactgcctatttagccctgaaaaagaaaaacggtgagtaccttatcaatggaaagtacatgatctccacttcagagactatcattgacatcaatggaacagtcatgaactatagcggttggagccacagggatgacttcctgcatggcatgggctactctgccacgaaggaaattctaatagtgcagattcttgcaacagaccccactaaaccattagatgtccgttatagcttttttgttcccaagaagtccactccaaaagtaaactctgtcactagtcatggcagcaataaagtgggatcacacacttcgcagccgcagtgggtcacgggcccatggctcgcctgctctaggac

SEQ ID NO: 3953 - DNA, 509 bp, Homo sapiens; identical to SEQ ID NO: 3951

SEQ ID NO: 3954 - DNA, 8868 bp, Homo sapiens
acgtcaagccatggcaactggggatcttggggatcctggggccagtgttctcgctcatgtggaggaggagtgcagtttgcctatcgtcactgtaataaccctgctcccagaaacaacggacgctactgcacagggaagagggccatctaccgctcctgcagtctcatgccctgcccacccaatggtacgctgctcccaagtgtcagcaaccatcatatgctacatgtcatttgtattctagcaataatgaataagggaagctggggaaataatattaatcttatactgcacagttccaccaatatgcagatcaataacaaacacctatgtgtttgtttttttttgagatggagtctcacactgttgtccaggctggagtgcaatggcacaatcttggctcactgcaatctccacctcctgggttcacatgattctcctgcctcagcttcctgagtagccgggattacaggtgcacaccaccacacttggctattttttctttattttttatttttagtagagacggggtttcactatgttggccagactggtctcacactcctgaccttgtgatccaccctcctcggccccctaaagtgctgggattacaggcatgaggcaccacgcccagccacatatgtgatttttaagttttattataagcaatattcagagaattggaataaataatcaccattttgaactctatgtatagataaaatccatcagcattggtgagtaaagagactgtgggataaaaaaaacacgtttgcatcttccccttaaaattaactatttaaacccacaagaatatatctaagtttcagaactgataaggtaatactgaaacatgtttgttttctaggtaaatcatttcgtcatgaacagtgtgaggccaaaaatggctatcagtctgatgcaaaaggagtcaaaacttttgtggaatgggttcccaaatatgcaggtgtcctgccagcggatgtgtgcaagctgacctgcagagccaagggcactggctactatgtggtattttctccaaaggtaactacacaccaactgtccagaagcagtaggcgtactggtggaaattatttggtagaatgaagcctgcggacgccagacgtaaacagttattagtttggggtcagttagattttggaaggtttttattttcatctctataacttctatattttcaaactttacacaatgaataaaaattattttataaacagaacaagtaaatgttttaaaagctatatttaaaaggtgtaactcactgtaaaaggtgtaactcactgtcaaggaaggcaaagtgtgaccttaactttaaagtaaccatgaaaacaactagtatttcctaagcagcattgtaaaggagaccataaagcaagaaaactttttctatttttctatgatttacttaagaattcctttgatgagccgtggagatgggtttcaagatcatatacctctgactcaggcttttgaataagtcaagaacccttaatatgaatcaatgtccctctagttatatatgttataatccttgtgtatgtgtataatatttgtgtatggaacatgccttatttttcacaagtgagcattttctaaatctatagcagagttttattcttatggtcagtgttatacagcaatttacaaatttgtaaacagttgctacatttaaaatcacctatggctgggcgcagtggctcacacccgtaatcccagcactttgggaagctgaggcgggcagatcacaaggtcaggagatcaagaccatcctgaccaacatggtgaaaccctgtctctactaaaaatacaaaaattagctgggcgtggtggcacacacctgtaatcccagctactcgggaggctgaggcaggagaatcatttgaactcgggaggcagagattgcagtgagccgagatcacgccactgcactccagtctggtgacagagcgagactctgtctcaaaaaaaaaattacctctgaaacttggccttcagatatttataatatgttattgaaaaacaagctaatgtcaatttatgaaattttttaaagctcatgtttttattagaaaataatgcattttcattcaaaaatattacacagaagtaaaaacataaaaatcacctgaaaataccaccatctacagagctattaacctgataaagtatattctacttcaactcacacacacacgcattcacaacatactcatacacatgcataaaaagagttttctatatacataaatataaaatttacaggcttatttatatatatgagtgtatatatattacatatactcacatgcacaagccacaatctatatacacactgttttataactagcttttaaactatacactaatccgtttattcaaaatatattcagtctcttccagtaagtccgttcatctaacttccccagactcctttttctgcactaatttggttgtgtcgatttcagtgtctgacagttcaacacacaatagggaatgctctccaaccatgacacagttttgaatgtcaagtttagattttcaaatttgtcattataataacaactatgcaacaaagaaggatctttgcattctcaagcctgctcatattcagttctgcacacaaatgatagtctgaaacactaagtgaaaagattacttctagtgagaatgtattatgcatacaaaaacgaagatgagtaccttgtgtctcttaacacattcagaggtaaggttaagagagaaaatgtgtaacctaggcttatccaaaatctgctttctggcaatatgacaaggatttttcagttagctacttctggaaactatgtttttttggcttttttttttttcaatggactgtccataccaatcaaactcaaaaaatcacaaatgagaacttactagttgaccaaaggagcaaatactgatgcaaacatttcccactcctaatgcatttgccatgattcaggtgaccgatggcactgaatgtaggctgtacagtaattccgtctgcgtccgggggaagtgtgtgagaactggctgtgacggcatcattggctcaaagctgcagtatgacaagtgcggagtatgtggaggagacaactccagctgtacaaagattgttggaacctttaataagaaaaggtaatatgatagaacctttgtctttatgtgaattgaacaaagctttagactcttgcagaattgataaaggaggattcatattacatcataagctatctgtatgaggaggtctaacgtggctctagaaacacattttaaatatgagaaggaagagacaggagatgaataaaactctggttgctcagggaaaactcatgctgcctctggaagcagataaactgcagtagccatgggaatcaatagcttgtagagtcagaaaactgaaaagaaaaagtgggggacattccactttagtgatatcttgcagatctagtgttattcctaaaacataatttagggaaggttggttggttttgatcttaactatatttttaaaaacaaattatccttacactgtgttttccttaagaaaatatttccccttgcaaaatgtaagttcattgcaatggtgtgggcaacagtgaagtatcctggtttatatctactctctaaagaaatatatacagcagtgtctctctcctgcttcctcttatggtcctagatttttgctttaaatattcaagtttatgaagtaccaatttccggcataaaatatgctatcaggtaggatgactgagttgactagagtctggtaaaatacaggcttgcttttcttcccaaaccactcttaggctgagtgttattagtcaaatgtatctgtattcttgatgtacgtgctgtgttgtctgtaacttgagagtaatatgcaaacgaaattaacaataggatttattaaaataattaaacatgttaatgtaaaaaactataaattttctctgatgtgatttgaaaatatatggctgaaaaatttattctgagttaaaatatgcgttactaattctatttgctaatgaaataattattcacctaattgtgttagaccatctatgtcaaaaaccctgcatgcccaattatatcctgcatttttatatgtttcaaaggtataaaacaccttggagatgatcagtccaaccttctgttttaaaaatgagttggactctgaaaatataggagttagccaattatccatggctgatgaatgccagagaagagcagacaccataactgaaatcctagaatacacaggtcactttgaaaaaaaaaagaagaaagagagatagaagaaagagagaaagaaagaaagagagagagagaaagaaagaaaaagaaagaaagaaagagaaagaaagacaaaggaaagagaaagaaagaggaaggaaggaaggaaggaaagaaaaaggaaaggagggagagagggaattcaggaatcaaattagaaacaaaactacttttaaaaagtaataccttatacactttatggtacatattctcttctatataaagttataaaccagttttaaaattgctaaatttagcattttaagtatttttgtgctgacaactaatatctgcacattttttcacatgaaaaagaagaaattcattatagcaacaagtggtatgcaatgtaaccacctgaaaattggtttgaccaagattctactatggtacaaatgacatgtttgagtagttcaaattaattacctagggaggccatagtaatttatatgatttatgaaaaagaacattgatctcatactgcaatatttgtaatcaagctttggctcaatgattccttagacatgtgatctttgaattgtcacctaatttctttaccaggagatttctcaaaagtaaagtggaaatactggtaattattatcatatggttaataaaactgttgtgaaggtgaaatgaggtaatacatattaaaatatttcatcaattttaagcccattcacaatatgaccctaatcttaactcgctcctccctcagttttcctcatctcagtaaatggcaactcagtctttctactattgaggccaaaactttggaggcatggttcacgtctcattttctctcacaccccacatccatccatcagcagatcctgtcagttctatttccaccacatctccagaatctgggtgcccctcaccaccgtgaccgctcccaccgcaatccaagtgttcatcagatcttgcctggactaacactgcagtcttctcgctgacctctggatcctttgctcctcaatctcatcttaccaagcaagggaagccatggctattacctaaaccagatcattgcattcctttgatcagtagcctccaatggcttccatcttacttagactcaatacccaagactgttttgtaatctctaaggtgctaaaagatctggccccttccctcctctatgtcttttctacactgtccctttctcatgctctgctctgaccagaatgcactttctcgcacttcaaaaacatgacaccaggtatgagaatgctgtttcctctgcctggaacactttctgctattaatgagcagtacactttccagaatctctttaggtctctgtcaaatatcacctccccagatggtggctaccgtaaatgtacaagaggacatctcctccactcccaccactactgtgcaacttcttaccttactccgtttcttcacagctcttatcaattgatatcaccacatattttgtttgctgggagcggactaaaacatcccttccctgagagcatgcttgaatataaatgaatatattttttcatgacagacattgtccttggcactgtgcagatagccctgaacaaaacaagattcctttgccctgccagccatactttgtaagagttgtatgaaaattgcattcacttatggtagtcgggaaagctggttagtgtctggagtttaaatgataccaagcaggatgtaaagaaaaggaatcaggaatatcaagagaatcatctcttactaaggcactaaaaaatcagggcactaatactcaggtttactagtgcttgtgaaactcagtttgaagacctgcagcaatactgaccatcatactaattctcatcaagatgagataagctctaaggaacaagggtaaacacccaaaaaagcttcccttaccctttattctttattttacttactccttactgggcatcatttaaactctgcacataaccagaatttaatttcatttaactgctataacatatggctggcaggggtcaggattttatgcctggggatatagtgaaaaagagcgctaattgggagtcaagagcctggctttttttttttttttttttaagacagggtctcactctgttgcccaggctggaataacaccatcttggctcactgcaacctctgcctcccaggttcaagcgattctcctgcctcagcctccagcatagctgggattagaggcacgggccagcatgcccagctactttttgtatttttagtacagacagggtttccctatgtttgccaggctggtcaggaactcctgtcctcaggtgatccccttgcctcagtctcccaaagtgctgggattacaggtgtgagccacggcatccagccaagcctggcttttaagcctaacactgccactaatcagctctaaagtgaacttgttcaaatactgtcatatatccccatttcatactctttttgtgtaagatgttatatttatctccaactaccttctgtttagacaggatctcattctgttactcgggctggagtgcagtggtgcactcactgcagccaagacctgggctaaagcgatcctcccacttcagccttgccagtagctaggaccataggcatgcgccaccatccctggctaactcttttactttttgtagagacaaggcctcccctgtatttcccaggctgctcttaaactcctgacctcgaggaattctccaacatcccttttgactttctttgaagccactatagtttcatggattatttattaatattaggtactacaaaacacatctgtaacaaaatctgatctgtaatgtattacaaaaataaaaataatgaatcgagttagacagaataaggaacgccctgagcattgcatcatctctcttcaacactgtaggaagctttaccacctgtgtggctgtcactgtagaacagattgccctgcagacaggggacttccttggcgataagcttcctttccaattcagaggaaactctggagtaagggaaacacacttggatttttagcatgtgaatgagaactggaaatgagacagttcagctccacacgtcagtcaaactgctcaagccaatagtattcctgtttaaataactaggaaagtgaagggaccctattatgaaattacttaaaaaggcaaaaatgtggacaaaagttgactcgtcatttcacccttggtgcttaattagcatttccatcctagcattcctcacaggtttatgggtattaaagatatttgtgtctttccccatttttttgtccagatgatggctctttgaagacttatatgtcactcaccataaagcctttctcaatctatcgtatcttatgggcactaagaattcagaaaaattctctaagtcatttaaaaaaattccccttttatgatggtattagtaatatcattacccaatttcagaattgcatgcttcatttatggcctgtcccaccaaatccagaattctagtagaaaggaatgcagagactctactcacctctagtccaaaaactaattaattctgtgttcccaagttagtctgcacattggaacaatgtgagaagtttcaaaagtgctcttgactgtgcccgaccctggaagatggggatttaattggtctgaggtgtgggtaggctctgaaagatttaaaagatccccacgtgattctaatgtggaagcaatctgagaaatattaaagaattatgtgagattaagtgaaggcatatttttgtcagtttgtgtttaaacagatcccattttgtgccagaaagaatggaaagtagatttgtaaagatgataggatctgataaggatgaaaatggttgtataaatcttgaaagttagtataaatgttttaaatgaaggcaggttgctagcatcatcctaattttgaacacctcaattaaagtgtatacaatactgtagtataattgcaattttctcataaaaaataatttttaaacccaattttaaactaatccattaaaactgtgtgttaagagaagactttttagagaacttctgtttgtgtatttatttgttaagtgtttactcatttttttctccctttttttaaccaccttcccccacttcctgtgaacattcctacttccagtaagggttacactgacgtggtgaggattcctgaaggggcaacccacataaaagttcgacagttcaaagccaaagaccagactagattcactgcctatttagccctgaaaaagaaaaacggtgagtaccttatcaatggaaagtacatgatctccacttcagagactatcattgacatcaatggaacagtcatgaactatagcggttggagccacagggatgacttcctgcatggcatgggctactctgccacgaaggaaattctaatagtgcagattcttgcaacagaccccactaaaccattagatgtccgttatagcttttttgttcccaagaagtccactccaaaagtaaactctgtcactagtcatggcagcaataaagtgggatcacacacttcgcagccgcagtgggtcacgggcccatggctcgcctgctctaggac

SEQ ID NO: 3955 - DNA, 1260 bp, Homo sapiens
attgtctaagtaaatgggtaggagaatctgaaagacagctacgattgctgtttgatcaggtatgatattaacattttatatatctggatagttctgtaatctaggcagatgtgtgtgaggattagataaatcttacatttaatcagtgttctaaataaacccagaagaattagactatttctttctagattattttcttttatatgtcgagatgacactgacctacagtgaacagttttatagtaagaagggaaagaaataattggatcttagttgtttggagtcttaggtctcatgcatataggaagagagtggtaatctcatatttagagagatagtagtagtgaattatggctcagtatgggagttaaagactatttctgccctggagcggctttcattttcatatcccagattgtattgacagcacattgtaagataatactttctgatctactgaggcatattgctgcaaatgcttttaaatctctttttggaactctcccgaggttcttttttacttttatgtttatggaaatggataaaaactgtggcatcttgctaaataatgttttcccatcctgacttggaggaagactatgtcactgtcttctattctttgtcttgtttccatagttcaataaatatttttgcgtgtccaggaacgatagctatgtgaaatctaaggtatataaccagtggagtatatcttttgaatacttctggttgaaaatgcaattgaaaattaaaccatatatcattataatttaattagaattcttaaaaccccgttactagaacttatgtttaaatttataaattataaatagttataaattataaataaattgagactgaggcaggaaaatcacttgaacccaggaggcagaggttgcactgagccaagatcacgccactgcactccagcctgggtgacagtgagactccatctcaaaaaaaaaaaaaaattatatataaattctggtaagtaagtttgaagaaaaaccgattcaaatagtatatattcagctttataaattctgttaagcatatttgaatgaaaatttattaaaatggtttatattaaatctacctgtttgaggctgtttatgctaacaaatgaccactccacctactttctaggcctatcaaatgcgcccatcaattattttttttgacaaaattgatggtctggctccagtacggtcaagcaggcaagatcagattcaccgggtaaaacttgcttgaaggcacttcaac

SEQ ID NO: 3956 - DNA, 3563 bp, Homo sapiens
agatgaattaaaaggcatttataaagatcgaatgaaaattggagcaagccttgccgatgttgatccaatgcaactagattcttcagtgagtactctgttttgaaacatatgcttgaactataatgtgctttgttttagttttaaagttaaaaaaaggaaccaatgatttttctttttagtcaaaactctaacctttacagacgttttctgttaatcttcaggtcacaattaagatattattacttcattgactgtgtatggtgtggggtgacattttaatctggactccaaatctaaaaatgtacatgttcgcttccattaccaggtacgatttgatagtgttggtggcctgtctaatcatatagcagctctaaaagagatggtggtgtttccattactttatccagaagtctttgaaaaatttaaaattcaacccccaaggtaatttaattatatttttaattttagctgaaaatctttgctattcttgcttcttgtagttcttataccttgcttattaacccatttttaagtgatagttcccttttcccttttcattatacaacttttctctctgaatcacctttatagaagcagtaatttaaataaacttttaaaaattagtaagctttccccccatcataaaagtaatatactgggccaggcacagtggctcatgcctgtaatcccagcactttggggggccaaggcgggtggattacctgagctcaggagtttgagaccagcctgggcaacgtggtgaaaccccgtctctactaaaatacaaaaaattagccaggcctggcggcgtgcgctgaggcacaattgcttgaacccaggaggcggaagttgcagtgagctgagattgggccaccgcattccagcctgggcgacagagcaagacaccatctccaaaaaaaaaaaaaaaaaaaaaaaaagtaatgtaccatatatcaatcacaggtaaacactggtgggttttaaattaaattttgtaatttaaaaaattagaaagtggccaggcacgatggcttatgcctgtaatcccagcactttgagaggtcaaggtaggtggatcacaaggtccggagttcaagactagcctggccaacatagtgaaaccctgtctttactaaaaatacccaaaaaattagccaggcatggtggcgggcacctgttgtcccagctactcgggaggctgaggcaggagaattgcttgaacctgggatgcggaggttgcagtgagccgagatcgcaccactgcagtccagcctgggcgacacagcaagactctgtctcaaaaaaaaaatagaaagtgccaggcatggtggctcacacctgtgattccagtgacttgggagactaagacaggaagattgctttagctcaggaatttgaggttgtagtgagctatgatcatgccactgcgctccagcctagctgacagtgagaccccatctttaaaaataagtcagaaagttattaatattaaataacatttacttcttacaggaaatgttggaagtgcctagttaaagtaatttagtaaattaaaaacaaatttcttgaattttctttcacatttcttcttccttacaatatacgttttcccccatacaaattgaattatatgattgtgatatgtgattacatatgcaaggtaagataatatgatgaacatgatgaatgaattgttaaaatgtttcaaatagagttttatttacagtttcaatattaattttacagtatcagtattaactcccaggttttaagttgtgctttgtggtgcgaaactgtaccataattcagttgtcttacacattttaattttctaattaaatgaatcatgaaattggtttctaatttttgttttaaaagtctgctttttaaatgtaatactaaaatgttaatgtattgttttacagaggttgtttgttttatgggccacctggaactggaaagactctggttgccagagcacttgccaatgagtgcagtcaaggggataaaagagtagcatttttcatgaggaaaggtgctgattgtctaagtaaatgggtaggagaatctgaaagacagctacgattgctgtttgatcaggtatgatattaacattttatatatctggatagttctgtaatctaggcagatgtgtgtgaggattagataaatcttacatttaatcagtgttctaaataaacccagaagaattagactatttctttctagattattttcttttatatgtcgagatgacactgacctacagtgaacagttttatagtaagaagggaaagaaataattggatcttagttgtttggagtcttaggtctcatgcatataggaagagagtggtaatctcatatttagagagatagtagtagtgaattatggctcagtatgggagttaaagactatttctgccctggagcggctttcattttcatatcccagattgtattgacagcacattgtaagataatactttctgatctactgaggcatattgctgcaaatgcttttaaatctctttttggaactctcccgaggttcttttttacttttatgtttatggaaatggataaaaactgtggcatcttgctaaataatgttttcccatcctgacttggaggaagactatgtcactgtcttctattctttgtcttgtttccatagttcaataaatatttttgcgtgtccaggaacgatagctatgtgaaatctaaggtatataaccagtggagtatatcttttgaatacttctggttgaaaatgcaggtgaaaattaaaccactatctcattataatttagtttgaattcttaaaaccccgttactagaacttatgtttaaatttataaattctaaatagttctaaattataaataaattgagactgaggcaggaaaatcacttgaacccaggaggcagaggttgcactgagccaagatcacgccactgcactccagcctgggtgacagtgagactccatctcaaaaaaaaaaaaaaattatatataaattctggtaagtaagtttgaagaaaaaccgattcaaatagtatatattcagctttataaattctgttaagcatatttgaatgagaatttattaaaatggtttatattaagtctacgtgtttgaggctgtttatgctaacaaatgaccactccacctactttctaggcctatcagatgcgcccatcaattattttttttgacgaaattgatggtctggctccagtacggtcaagcaggcaagatcagattcacaggtaaaacttgcttgatggcacttcaacgtttcttcctatttcctgagtggtattgatgtgtgagagatagaatgttaaatggtgaaagaaactttataagctagtagttcctttttttggtagtagaaccccagtatatagtacaaaaataaaaaatgtggatggttgcagtggctcatacctgtattcctggcactttgggaggccaaggcaggcagatcacttgaggtcaagagtttgagaccagcctggccaacatggtgaaatcctgtctctactaaaaaaaaaa

SEQ ID NO: 3957 - DNA, 1163 bp, Homo sapiens
ggtgcaatcatggctcactacagcctcgtcctcccaggctcaagcaaatctctcacctcagcctcctgagtatctgggacaacagatgtgctacaaccatacctgtctaagctttttgatttttagtagagaccaaatcttgccaagttgctcgaatgatttttagtggagacaatgtcccgctacgttgtgcttgaacacctgtcaagtgatccttccccctcggtctcctaaagtgttgggattacaggtgtgagccaccacacccagccccaaatattctaataccctcttaatcccacctttctctttgagaataactgatttatatcaagactaagaagtcaccctgccttctcctgtctccatgaacatttgatattcagctctgccacagtctttagtcttttttcctttcctctcagttgtttaagtcttttattccatttgaaagattcagcgaacaaagtttatgtcagtgggtcagcagatgtattaattttatgataaactttttggagcattaggtatttctgatgcttttcttatgccttttctttttcctgcccttccttatcatgatttcaattttgttttttactttaggcgaaggcatgcaatccacagtagtgactcgacttcatcttcctcctctgaagatgaacagcactttgagaggcggaggaaaaggagtcgtaatagggctatcaataggtaagtgccatattgatgcctttttaaactagcagacacattttgtaaaaattgctaagaaaacagaataatttgggtataagtataggctggctgattaaaaagttgcacaacaggttaatgtataaactagaatgctgtcttgttagaattatctacagttgaatcagaataacaggttagaacatatgactgatttcttgactttttttttttttttttgagacagggcctggttctgttgcccaggctggagtacagtggcgtgatcttggctcactgcaaccaccacctcccgggttcacacgactctcctgcctcagcctcctgagtagctggggttacaggtgtgcatcaccacacctggctcatttttgtagttttaatagagatgaggtttcgccatgttggccaggctggtcttgaactactggcctcaagttatccac

SEQ ID NO: 3958 - DNA, 475 bp, Homo sapiens
ctccgagtgtcagtgtgttgtaaagcatggtttaaaaatcttggttacagaagatttaactcatgatagaaacaaatgtctgcgggtcagtgatgttaagccactagtaagaggagggctatggtggggaatgtggctgaatgtcctatcacaagagcatattcagttgcttttatctctgacctgttactgatgtgcagaagcttacccagacttgaaaaatcgattttttccctcagattttatgttcaaattgtcaagtatcttaaattttaccagctaatttggatgcttttaagacattgcctgcgctaaacaaaatctaacttagggcattactactagtttaggattctaatactagaccaatctccccattttaaagatgggtaaattgaaccctcaacccccatgattagttgcttatccaagggagcacttttacaagtgctattgtcccaacctgaatctaaat

SEQ ID NO: 3959 - DNA, 8439 bp, Homo sapiens
cagggagctgactctgcagaagggtgacattgtctacatccacaaggaggtggacaagaactggctggagggagagcaccacggccgcctgggcatcttccctgctaattatgtggaggtgagcaggagagacaagagcaagtggggctgggctgggagggcgcaggggttgggagagacttagtgcaaaccttgggtttcctaaagcaaaaaactgtgaggggctggggcgtgtctcggaactgtccttggcccccacagggcttggcccaatgctgtgcatgaccccaggaaatgtttgctaaatgagggtggagcctagcccaggggaggacccagcagccagctcctcaaccattcgtgtcccagactttcaccattcagatccgtctttctaaagctgtctttggaaatcatcctaatggcaactagcaagagtgggaagtgtgcgacagtttataaatcacgtatacacgcataacctctttcaggtgtattaccgccctggttcctctcactgcccagagagtgatagattatctctgttttacagatggggatgccaaggttcagtgaaaagttattaagtaaaagatccagaatctgaatccaggtcttttgattccagagacaggttctgggcttgacagataaagggcgataggttatctttgctatttgtgacttttaaaatatgtcaagttatccaaattactggcataaaggtgttcattatagtctcttactatccttttcatgtcagtaaaatatgtagtgatgtcttctctctctttttttttttttgggagagacagagtcttgctctgctgtccaggctggagtgcagtggcgggatcttggtgcactgcaaccctcccccctcctggttcaagggattctcctgccccagcttcctaagtagctgggactacaggaatgcgccaccacgcccagataatttttgtaattttttagtagagatgaggtttcactatacattggcctggctggtctcgaactcctgacctcaggtgatccacccgcctcagcctcccaaagtgcttgggttacaagcgtgagccactgtgcccggctgatatgttctctttcattcctgatgttggcaatttgcgtcttctcttattctgtctagagctttattaatttacttgatctttggattttattcatgtttttctctcgtttttgttttcgatttcattgagttctgcttcttatttgcttattgttgcttgcttttggtttaatttgttatttttctaagtttcttaggatgaaagtttagactattgatttgaaacatttttccctagaatgctgctttaactgcatctcacacattttgatttttcatcaactcttgactgttttctcatctcgtctgtgacttcctctttgacccatgggttgggttgttgtttaattcaggctcttgttttgataggtatcattaggcctcccttgcttacacgatgatccacttggtcctgaaatttcacaaagtatatacagtatttcactccgccagtcgtttctatctttgtgtgaaatggtttattggctgcttgatttttatgggcagagtgaagcaaagagaacgtgaggattctgggctccggctggggtagatggggaggaagaaccgagacgctggaacccagggacacccggttctcagcagtgagaaaagggtgaatgctcagttttggaacagttccccaagttccccttgctgcttggaacgcctcattttcttctgtggtccaacttaaactctctaattggactggcttccatcttttctcttggagttcttcacttcagtaatgcccactccatatatccctatggaaaattcttcttccagggagcgttcccagactcctccccatcctccagcaccctttggctgtgcccacccgtggctgcccccagggcttgtgtctggtgtttatatcttttctctgcctaggggcgggcccaccttctctttgctgtctcacaggaacccccagcctgtgctatgttgatgcccaggccaaatctttctcatgacctttcttcatgcaggtgctgcccgcagatgagatccctaagcccatcaagcccccgacctaccaggtgctggagtatggagaggctgtggcccagtacaccttcaagggggacctggaggtggagctgtccttccgcaaggtgggccaggccggagacggaggggtgggtgggggcaggtgaagatgtaggtaaatatgtgcactaaaaacagttttttttttttgagacagagtctcactctatcgccaggctgtagcgcagtggtgccatctcggctcactgcaacctccgcctcccgggttcaagcaattctcctgcctcagcttcccgagtagctgggactacaggcacgcgccacaacacccagctaatttttgtatttttagtagagacagggtttcacgatgttggccaggatggtctcagtctcttgacctcataatccacccgcctcagcctcctaaagtgttgggattacaggcgtgagccaccgcgcctggcctaaaaacacttctttaaaaaagagtccgatgtacctagcttcacccaggatttcaaagttttccccagtctctttcattatgcttcctttagtgtagtggcttttttttgcttttttttgagacagcatctcactatgttgcccgggctgaccttgaactcctgggctcaagcgatcccctgtccctgccccagcctcccaagtaattttggtccatttttaaaagatcatcataaacttctagagttacatatatattttttcaactgcaggttgcaggggatcatactcagcatttttaaaggtatagacagaaatgttagcatgcgttgcgagcagaaagcactttatcataccgtaggcagttctgtgtatgcacatatatatgtattctgggctgttattaaaacatttttaactgtagattgtggtgaaacaagtttgaaaaatgctgttctagaaagcagggaagtggtctgcctttggttgattttgggagcagtgatcatgctcccaaaataagcgaaagacggcccatagtgaatgcctcccagaagagctggccccagggacagagggggaagaaggtggctggatggagacagatgggggcaggagaggacaggggaaggcaagggctggaggccaccctcccagggggtggttctacctaatgtcagccagcctgtggccttcaggactccctgcctgtcctggggagtgtgtttttgacacgctcatgacaaggtcccccagcgtgaggcaggaacaggacccaggcagggcagtagtggtagcacctgtccagtgtgtctaaggagtggactgttgatctcgttcacacctcatagtgacagtatggttattttcacttaacataggagaaaacaaggctcagagagacagagcaggctgcctgaggccacacagcttggcctggtggagctgggtttggatctgtattattagccacgggctcacctgtgatcggagctctggggagggaccttgctatgaacgccgaagggggatgcacacccgttgagcttccaagaggcaggacccagtctcagcctcagccttgcctgggcagcctgggcttggctcctggctcctgctcttaccgtgtgactcgggtaaactgctggccccctgcgattccgacccctcgtgtgtccaaggtgttagggttgaatgagacagcccagataaggcacccgtgggtccatggcaccaggaaggccccacagacactgacttttcccccctcagggagagcacatctgcctgatccgcaaggtgaacgagaactggtacgagggacgcatcacgggcacggggcgccaaggcatattccctgccagctacgtgcaggtgtctcgtgaaccccggctccggctctgtgacgacggcccccagctccccacgtctccccgcctgaccgctgccgcccgctcagcccgtcaccccagctccccctcagccctgcgcagcccagctgaccccatcgacttggggggacagacctccccccgtcgcactggcttctccttccccacccaggagcctagaccccagacccaggtgaggtagcctgcctccaccagagagtcgacctcctcctcacccctcatcccccacccccgtgacttgtccacacttgggactccttcccagacagccctgggacataggagtggggtgacagggcagaagctagtatggcagccccaccctggcctgggggacctcaacctaccgagctctagccgagggagctctagatggaatcccaaagccggcccaggctcctgaccctgggtgttcttggttcatccatgctggcgtccagaaacccaggcactgaccttacttgggcctcagttttctggcccctgtgaaatgaaatagtcacagcaggtgtccctgtgccctgggggtttggaggctaagatgaagccgtttgtaaggcgtgctggcaggtggactgggaacgcccattttgggcctcctccctcaggcttacatgtacccatcgtcttcctccctctgacatccctttcttcctgtcaactcccagaatcttggcacccctggtccagctctgtcccactctcgaggtcccagccatcccctggacctggggacctcctctcctaacacctctcagatacactggaccccgtgagtaccatctgagggctcttgatcagacgtggggggggtcactggcaggcaatgccccatattccaccctcccccaagtccccacctgtggatttgggaaacttctaccaggtagcccttgtcctcgaagagcttatggtgatttggggcagggaggaggcgctggtctgtgatgttcccaatccctcctggcagctatgtggccttgtggccttggtctcctcattgggtttctagccctgaggtcggtgcatgtataattgaagtgtggaactggtggaatggacaggaaggcaccaggtgctcagaggaggcgagggttcagtgcttagggcccagagggcaggaggcaggcctgggaaagactacggtgagcacaggctgagttgctctgaggagctggatcaggggctagtgagagcatgaagggaccctggggcattcacaggaagcggcaacacttgggttagagcctctgggcccattctctggttgccatgatacgcttctcgcaggtaccgggcgatgtaccagtacaggccccagaacgaagacgagctggagctgcgcgagggggacagggtggatgtcatgcagcagtgtgacgatggctggtttgtgggtatgtgggcaggccgggagggggcatctcagggccccaggggatgtgggtggggtgctgttgcctgccagtgctgcttcagcaaagattcatggccgaccaccccccgactcagcttccggccgggctactgggggggcctggcacccgatgcttccccaaagccagcccttctgttggctgccttccttcatgaagaggccaaggcccaggaggaaactggcaccagtccagggtcactgatggagtcagtggggacccaggccagggttcccaacgtccagagctctgcctcttcctcctgcacacccctgcctcgagcagccctgggggagagctcctggtggaaaggaccagggctcacacttgacctagctggctcctccagcctgggaggaagagggaatggagaaaggtcccagcccctcagggctggcccaagggcagctctgaccaaggacaaatgcaggaagcctcaggttggcctcagcctgaatcaaggtgaccaacccaccaggcttcacatggcctctttccccagagtgggcgggccctgtgcaggtctcatcttcaaaggatgggccgtccccagagagaagagagtggccagaagccccctgccctgccccaagcaggctttgaagcctgaggagttggggggctgcttgggcagccccttgacctggcagcccacccttcctgatctgatcccagtacagctgccagccagctgtactgacccacccaggaccattaagcactagcctgtgaatggcccctaccttctagtgggggagggagggaggcggtgcttggagatgcattcaaatttactggatacacttttgctttggaatttttttacaactactaataaagttttgcaaacctatgcagacaagaagaaaaagtaccacttttgtattaggagccacaagcgctttgagaggaatgggcgagacctgtgccctttccggtatggcagccaccggcggcattcagctgttgaaatgtagctcaaatgaaataaattaaaaatccagttcctcagttgcacaggcacatctcaagtgcccaacagccacaggtggcgagtggtgcccattttagttagtgcaggtcagggaaggcttcctggaggaaatgagggagctgggcctggaagggcaggggaaggatttggggaggccaagaggaaagggaggtactcggggcagaggacgagggtgggggtgggacgagcacgggctgcccccaaggaagtcagggtgccagcctggaaggggaggcccaggatcatccattcacccaaggtcaggagtgacgttcatttcagtttatattcctatttttctatatataggaatataataatatttattacatttctgtatttctatatttctccattccctcttcctcccaggctggaggaaccagctggggggtgtggggatacacaggtgtgagccctggtcctttccaccaggcgctctccccaagggctgctccagaggcaggggtgtgcagggaaaaggggcagggctctgaaggtcggcaaccccggcctgggtccccagtgactccatcagtgaccctggggtggtgccagtttcctccagggcgtctttctcttcatggcacgaaggaaagcagccaacagaagtgctggctttggggaagcatcgggtgccaggccccccagatgctttgcccgctggggttcccccccctcctcctcttcaagacacgagtttctgtggggctgagaggcctggatcggagtcccaagcttactcctaagcgtcggggtgctctcgggcaatgcattcagccttcccataggccttcccacccatctctaagtgagggtgccctattagaccagggacgtttctcccgatttcagttctgtgattcctcctcctgtgtccccactttgcggaggagggggggagtgactctgctgtgtacagtgtgatgcacatttgttgattgctcagattctttggtggttgagtgtgggaagtgtagctttgcccatctaagcttctgccgctagggggcaggaaggaggagagcaaatccaattccctctctgggctcccctacagaactcccctacagttctgggcactgccggcagggggcaggccctcacccctgcatccctgttaaagaagggagtggggaaagctcttcctgcctttcctctttcaggtgtctcccggaggacccagaaattcggaacgttccctggaaattacgttgccccggtgtgagtggtctccatggcaacttggagccagccaggatggggtggggagcggtggcactcgtgggagggagaggacccccgcccacatcctccttccccaggacctgagctcccagcatctgcagacgacccccgcagcctttccctcggacccccctcgaagccccctggactgattcccacccacgactcacaggcattcctcccacagccctttcatttcctccccaccccactccccaaatacagaggtctgctttgaagcggagaccatttccaggccttattgagaccagaccccaagtcccccacccccatcctgctccagcgtttcctctaacagggaccagctctccgctttgcccccacggggttcctctaaccagaaccagcttcctagcctcgtagagaccaaaggccgcccccgcctgctggggttcctcccagcaccccagcttgctggctgccctctttgccttctggcctccagctgggtgtgggggggcggagcaaggcgggggacagacgcagcaccttcttagcgatctaggcctggcaagagctctggccccaaggcctcctcttcccaggggctgccaagtcctggccctggccctggcatatcaccccgcactgtggggccaggcaccactagcctggctcaaatattccccagggagactgctgtgtgctgcccgcctgcctgctggctctcccccagccccacatcccctctggaagagaatgtaaaataaacctggacacaaggga

SEQ ID NO: 3960 - DNA, 9875 bp, Homo sapiens
gcccccgggccccagcctcggggacccccgccccttcccctagttcccgccccgctcccgggatcggccgcgcgggcgcctctaggaccccgcgtcccgcccgctctcctcccctcccgagccgcgaacttttccggaggcggcggcctcggctgccgctgggtcccggggtcgcgggccctgattgcgccgtttccccgcgcagagctcgccggcgccccgacgggccccggagcagcggcccccggccgggtgagtgggagacgcgggaggaggaagggggctgtcccaggccgggcgggagggaacgtggcgcggccgggcggggcggacgggggcgatcgcggggcccagccgggggaggaaggaaccgcagagccgtgtccgggagggaccgcagcgccactctctgcggggcgccgttcccgcgccaccgagggcagctaactcctagcagaggaccggggtcgcggccgccgggggcgcagcgcggttagggcggccccgccacggcccaggcactcccgctgggccctgccgggcctcacccttccccgcgcagcgactcgggaagtaggacatcctgtggagagcccaggacccgggagacgccctgggaggaggtggcagggatgggggcgatggggggtcagagcggtctaggggtgaccagggtggggtgcggagccccaggctggaggctcagtctttgtgccccgtgcagcccggcctcagcctggagctccagctacccacatgcaccttacttgggttccgcccggtccctgagtccccacaaaatggctgatggaggaagccccttcctaggtcggagggactttgtctacccttcctcaacccgaggtaaggacccagccctgctctctttctcacggagatgcccacccaccaggcatgttggtgccccaggggtggcaggtcacagagccccttgcttctgccagtgcctgccctaggtgggggtgcaaccccatcccccaggtatggcctccccaagctgaggttgtgcttctccacagaccctagtgcctctaacggagggggcagcccagccaggagggaagagaagaaggtaaggaggggaccaggtgtgggggacctggagtggtcccaaggctgccatcctggatctgccacccgcccaactgagagagcccactctgtcctctcccctgcctagagaaaggccgccaggctcaagtttgacttccaggcgcagtcccccaagtaagcgccctcctccccctccccttccacccaaggcaatctctgccatcccagagggggatggggagggggactgggctgcagtgggcatccccaaggggtgagagaactggggtgtgttgggcagggtctgaagggaaggaggcttgggaaggcttcagcttaccctgcggtcctcgtccccacctgcagggagctgactctgcagaagggtgacattgtctacatccacaaggaggtggacaagaactggctggagggagagcaccacggccgcctgggcatcttccctgctaattatgtggaggtgagcaggagagacaagagcaagtggggctgggctgggagggcgcaggggttgggagagacttagtgcaaaccttgggtttcctaaagcaaaaaactgtgaggggctggggcgtgtctcggaactgtccttggcccccacagggcttggcccaatgctgtgcatgaccccaggaaatgtttgctaaatgagggtggagcctagcccaggggaggacccagcagccagctcctcaaccattcgtgtcccagactttcaccattcagatccgtctttctaaagctgtctttggaaatcatcctaatggcaactagcaagagtgggaagtgtgcgacagtttataaatcacgtatacacgcataacctctttcaggtgtattaccgccctggttcctctcactgcccagagagtgatagattatctctgttttacagatggggatgccaaggttcagtgaaaagttattaagtaaaagatccagaatctgaatccaggtcttttgattccagagacaggttctgggcttgacagataaagggcgataggttatctttgctatttgtgacttttaaaatatgtcaagttatccaaattactggcataaaggtgttcattatagtctcttactatccttttcatgtcagtaaaatatgtagtgatgtcttctctttcttttttttttttttggagagacagagtcttgctctgctgtccaggctggagtgcagtggcgggatcttgatgcactgcaacctccacctccctggttcaagggattctcctgccccagcttcctaagtagctgggactacaggaatgcgccaccacgcccagataatttttgtaattttttagtagagatgaggtttcactatacattggcctggctggtctcgaactcctgacctcaggtgatccacccgcctcagcctcccaaagtgcttgggttacaagcgtgagccactgtgcccggctgatatgttctctttcattcctgatgttggcaatttgcgtcttctcttattctgtctagagctttattaatttacttgatctttggattttattcatgtttttctctcgtttttgttttcgatttcattgagttctgcttcttatttgcttattgttgcttgcttttggtttaatttgttatttttctaagtttcttaggatgaaagtttagactattgatttgaaacatttttccctagaatgctgctttaactgcatctcacacattttgatttttcatcaactcttgactgttttctcatctcgtctgtgacttcctctttgacccatgggttgggttgttgtttaattcaggctcttgttttgataggtatcattaggcctcccttgcttacacgatgatccacttggtcctgaaatttcacaaagtatatacagtatttcactccgccagtcgtttctatctttgtgtgaaatggtttattggctgcttgatttttatgggcagagtgaagcaaagagaacgtgaggattctgggctccggctggggtagatggggaggaagaaccgagacgctggaacccagggacacccggttctcagcagtgagaaaagggtgaatgctcagttttggaacagttccccaagttccccttgctgcttggaacgcctcattttcttctgtggtccaacttaaactctctaattggactggcttccatcttttctcttggagttcttcacttcagtaatgcccactccatatatccctatggaaaattcttcttccagggagcgttcccagactcctccccatcctccagcaccctttggctgtgcccacccgtggctgcccccagggcttgtgtctggtgtttatatcttttctctgcctaggggcgggcccaccttctctttgctgtctcacaggaacccccagcctgtgctatgttgatgcccaggccaaatctttctcatgacctttcttcatgcaggtgctgcccgcagatgagatccctaagcccatcaagcccccgacctaccaggtgctggagtatggagaggctgtggcccagtacaccttcaagggggacctggaggtggagctgtccttccgcaaggtgggccaggccggagacggaggggtgggtgggggcaggtgaagatgtaggtaaatatgtgcactaaaaacagttttttttttttgagacagagtctcactctatcgccaggctgtagcgcagtggtgccatctcggctcactgcaacctccgcctcccgggttcaagcaattctcctgcctcagcttcccgagtagctgggactacaggcacgcgccacaacacccagctaatttttgtatttttagtagagacagggtttcacgatgttggccaggatggtctcagtctcttgacctcataatccacccgcctcagcctcctaaagtgttgggattacaggcgtgagccaccgcgcctggcctaaaaacacttctttaaaaaagagtccgatgtacctagcttcacccaggatttcaaagttttccccagtctctttcattatgcttcctttagtgtagtggcttttttttgcttttttttgagacagcatctcactatgttgcccgggctgaccttgaactcctgggctcaagcgatcccctgtccctgccccagcctcccaagtaattttggtccatttttaaaagatcatcataaacttctagagttacatatatattttttcaactgcaggttgcaggggatcatactcagcatttttaaaggtatagacagaaatgttagcatgcgttgcgagcagaaagcactttatcataccgtaggcagttctgtgtatgcacatatatatgtattctgggctgttattaaaacatttttaactgtagattgtggtgaaacaagtttgaaaaatgctgttctagaaagcagggaagtggtctgcctttggttgattttgggagcagtgatcatgctcccaaaataagcgaaagacggcccatagtgaatgcctcccagaagagctggccccagggacagagggggaagaaggtggctggatggagacagatgggggcaggagaggacaggggaaggcaaaggctggaggccaccctcccagggggtggttctacctaatgtcagccagcctgtggccttcaggactccctgcctgtcctggggagtgtgtttttgacacgctcatgacaaggtcccccagcgtgaggcaggaacaggacccaggcagggcagtagtggtagcacctgtccagtgtgtctaaggagtggactgttgatctcgttcacacctcatagtgacagtatggttattttcacttaacataggagaaaacaaggctcagagagacagagcaggctgcctgaggccacacagcttggcctggtggagctgggtttggatctgtattattagccacgggctcacctgtgatcggagctctggggagggaccttgctatgaacgccgaagggggatgcacacccgttgagcttccaagaggcaggacccagtctcagcctcagccttgcctgggcagcctgggcttggctcctggctcctgctcttaccgtgtgactcgggtaaactgctggccccctgcgattccgacccctcgtgtgtccaaggtgttagggttgaatgagacagcccagataaggcacccgtgggtccatggcaccaggaaggccccacagacactgacttttcccccctcagggagagcacatctgcctgatccgcaaggtgaacgagaactggtacgagggacgcatcacgggcacggggcgccaaggcatattccctgccagctacgtgcaggtgtctcgtgaaccccggctccggctctgtgacgacggcccccagctccccacgtctccccgcctgaccgctgccgcccgctcagcccgtcaccccagctccccctcagccctgcgcagcccagctgaccccaccgacttggggggacagacctccccccgtcgcactggcttctccttccccacccaggagcctagaccccagacccaggtgaggtagcctgcctccaccagagagtcgacctcctcctcacccctcatcccccacccccgtgacttgtccacacttgggactccttcccagacagccctgggacataggagtggggtgacagggcagaagctagtatggcagccccaccctggcctgggggacctcaacctaccgagctctagccgagggagctctagatggaatcccaaagccggcccaggctcctgaccctgggtgttcttggttcatccatgctggcgtccagaaacccaggcactgaccttacttgggcctcagttttctggcccctgtgaaatgaaatagtcacagcaggtgtccctgtgccctgggggtttggaggctaagatgaagccgtttgtaaggcgtgctggcaggtggactgggaacgcccattttgggcctcctccctcaggcttacatgtacccatcgtcttcctccctctgacatccctttcttcctgtcaactcccagaatcttggcacccctggtccagctctgtcccactctcgaggtcccagccatcccctggacctggggacctcctctcctaacacctctcagatacactggaccccgtgagtaccatctgagggctcttgatcagacgtggggggggtcactggcaggcaatgccccatattccaccctcccccaagtccccacctgtggatttgggaaacttctaccaggtagcccttgtcctcgaagagcttatggtgatttggggcagggaggaggcgctggtctgtgatgttcccaatccctcctggcagctatgtggccttgtggccttggtctcctcattgggtttctagccctgaggtcggtgcatgtataattgaagtgtggaactggtggaatggacaggaaggcaccaggtgctcagaggaggcgagggttcagtgcttagggcccagagggcaggaggcaggcctgggaaagactacggtgagcacaggctgagttgctctgaggagctggatcaggggctagtgagagcatgaagggaccctggggcattcacaggaagcggcaacacttgggttagagcctctgggcccattctctggttgccatgatacgcttctcgcaggtaccgggcgatgtaccagtacaggccccagaacgaagacgagctggagctgcgcgagggggacagggtggatgtcatgcagcagtgtgacgatggctggtttgtgggtatgtgggcaggccgggagggggcatctcagggccccaggggatgtgggtggggtgctgttgcctgccagtgctgcttcagcaaagattcatggccgaccaccccccgactcagcttccggccgggctactgggggggcctggcacccgatgcttccccaaagccagcccttctgttggctgccttccttcatgaagaggccaaggcccaggaggaaactggcaccagtccagggtcactgatggagtcagtggggacccaggccagggttcccaacctccagagctctgcctcttcctcctgcacacccctgcctcgagcagccctgggggagagctcctggtggaaaggaccagggctcacacttgacctagctggctcctccagcctgggaggaagagggaatggagaaaggtcccagcccctcagggctggcccaagggcagctctgaccaaggacaaatgcaggaagcctcaggttggcctcagcctgaatcaaggtgaccaacccaccaggcttcacatggcctctttccccagagtgggcgggccctgtgcaggtctcatcttcaaaggatgggccgtccccagagagaagagagtggccagaagccccctgccctgccccaagcaggctttgaagcctgaggagttggggggctgcttgggcagccccttgacctggcagcccacccttcctgatctgatcccagtacagctgccagccagctgtactgacccacccaggaccattaagcactagcctgtgaatggcccctaccttctagtgggggagggagggaggcggtgcttggagatgcattcaaatttactggatacacttttgctttggaatttttttacaactactaataaagttttgcaaacctatgcagacaagaagaaaaagtaccacttttgtattaggagccacaagcgctttgagaggaatgggcgagacctgtgccctttccggtatggcagccaccggcggcattcagctgttgaaatgtagctcaaatgaaataaattaaaaatccagttcctcagttgcacaggcacatctcaagtgcccaacagccacaggtggcgagtggtgcccattttagttagtgcaggtcagggaaggcttcctggaggaaatgagggagctgggcctggaagggcaggggaaggatttggggaggccaagaggaaagggaggtactcggggcagaggacgagggtgggggtgggacgagcacgggctgcccccaaggaagtcagggtgccagcctggaaggggaggcccaggatcatccattcacccaaggtcaggagtgacgttcatttcagtttatattcctatttttctatatataggaatataataatatttattacatttctgtatttctatatttctccattccctcttcctcccaggctggaggaaccagctggggggtgtggggatacacaggtgtgagccctggtcctttccaccaggcgctctccccaagggctgctccagaggcaggggtgtgcagggaaaaggggcagggctctgaaggtcggcaaccccggcctgggtccccagtgactccatcagtgaccctggggtggtgccagtttcctccagggcgtccttctcttcatggctcgaaggaaagcagccaacagaagtgctggctttggggaagcatcgggtgccaggccccccagatgctttgcccgctggggttcccccccctcctcctcttcaagacacgagtttctgtggggctgagaggcctggatcggagtcccaagcttactcctaagcgtcggggtgctctcgggcaatgcattcagccttcccataggccttcccacccatctctaagtgagggtgccctattagaccagggacgtttctcccgatttcagttctgtgattcctcctcctgtgtccccactttgcggaggagggggggagtgactctgctgtgtacagtgtgatgcacatttgttgattgctcagattctttggtggttgagtgtgggaagtgtagctttgcccatctaagcttctgccgctagggggcaggaaggaggagagcaaatccaattccctctctgggctcccctacagaactcccctacagttctgggcactgccggcagggggcaggccctcacccctgcatccctgttaaagaagggagtggggaaagctcttcctgcctttcctctttcaggtgtctcccggaggacccagaaattcggaacgttccctggaaattacgttgccccggtgtgagtggtctccatggcaacttggagccagccaggatggggtggggagcggtggcactcgtgggagggagaggacccccgcccacatcctccttccccaggacctgagctcccagcatctgcagacgacccccgcagcctttccctcggacccccctcgaagccccctggactgattcccacccacgactcacaggcattcctcccacagccctttcatttcctccccaccccactccccaaatacagaggtctgctttgaagcggagaccatttccaggccttattgagaccagaccccaagtcccccacccccatcctgctccagcgtttcctctaacagggaccagctctccgctttgcccccacggggttcctctaaccagaaccagcttcctagcctcgtagagaccaaaggccgcccccgcctgctggggttcctcccagcaccccagcttgctggctgccctctttgccttctggcctccagctgggtgtgggggggcggagcaaggcgggggacagacgcagcaccttcttagcgatctaggcctggcaagagctctggccccaaggcctcctcttcccaggggctgccaagtcctggccctggccctggcatatcaccccgcactgtggggccaggcaccactagcctggctcaaatattccccagggagactgctgtgtgctgcccgcctgcctgctggctctcccccagccccacatcccctctggaagagaatgtaaaataaacctggacacaaggga

SEQ ID NO: 3961 - DNA, 408 bp, Homo sapiens
ggccttggagggcgggagaagatgggagaggaaatggggaaccccattggtgctgtaacagagacacaacttggcagaaactggcaggactgcggaatcgcgggatcaggaagcgcgtaggcactcccggggcgtgctgggcaggtgagaggccgtggcggggatgccctcttggcaccctgggccacacctcctggcaggagcccggcccgtgcgctgaggcctgcccttacgccggcccggtgcgctggccttgcttttcacagtcgatctttgaccgctgcctcccacccccacggtgcgctgcccctcactgcccagcctctccccgcccccaggtgctgctggagagagagctggccgagctgagcgccgagctggacaaggacctgcgggcaattgagaccc

SEQ ID NO: 3962 - DNA, 509 bp, Homo sapiens
ttaagtcttgcacgttagcactgacccacaactgggcctcaactgtgctgtgttcacgtgaggaaagaatgaagggttgagggtacataaggggggagaatggaaagaaaaggacgattcactcagacatagcccctttgctactggagtggacagataaatatcaaaggtaactccgcaggcctgcagccggtgaactcagttgaagtgcaagtatctaaaggaagtgaagttgaaagtgtgatttaaggctggcgtggtgggtggctcacacctgtaatcccagcactttgggagacccaggtgggtgaatcccttgaggccaggagttcaagaccagcctggccaacatggcgaaactctgtctctactaaaaatacaaaaattagagccgggcgtggtggctcaagcctgtaatcccagcactttgggaggcccaggtaggtgaatcacttgaggtcaggagttctcaaccagcatgaccaacatggtgaaactccgtctctact

SEQ ID NO: 3963 - DNA, 509 bp, Homo sapiens
ttaagtcttgcacgttagcactgacccacaactgggcctcaactgtgctgtgttcacgtgaggaaagaatgaagggttgagggtacatgaggggggagaatggaaagaaaaggacgattcactcagacatagcccctttgctactggagtggacagataaatatcaaaggtaactccgcaggcctgcagccggtgaactcagttgaagtgcaagtatctaaaggaagtgaagttgaaagtgtgatttaaggctggcgtggtgggtggctcacacctgtaatcccagcactttgggagacccaggtgggtgaatcccttgaggccaggagttcaagaccagcctggccaacatggcgaaactctgtctctactaaaaatacaaaaattagagccgggcgtggtggctcacgcctgtaatcccagcactttgggaggcccaggtaggtgaatcacttgaggtcaggagttctcaaccagcatgaccaacacggtgaaactccgtctctact

SEQ ID NO: 3964 - DNA, 509 bp, Homo sapiens
ttaagtcttgcacgttagcactgacccacaactgggcctcaactgtgctgtgttcacgtgaggaaagaatgaagggttgagggtacatgaggggggagaatggaaagaaaaggacgattcactcagacatagcccctttgctactggagtggacagataaatatcaaaggtaactccgcaggcctgcagccggtgaactcagttgaagtgcaagtatctaaaggaagtgaagttgaaagtgtgatttaaggctggcgtggtgggtggctcacacctgtaatcccagcactttgggagacccaggtgggtgaatcccttgaggccaggagttcaagaccagcctggccaacatggcgaaactctgtctctactaaaaatacaaaaattagagccgggcgtggtggctcacgcctgtaatcccagcactttgggaggcccaggtaggtgaatcacttgaggtcaggagttctcaaccagcatgaccaacatggtgaaactccgtctctact

SEQ ID NO: 3965 - DNA, 509 bp, Homo sapiens; identical to SEQ ID NO: 3964

SEQ ID NO: 3966 - DNA, 89 bp, Homo sapiens
gctaggatcacaccactgcactccagcctgaatgacagagtaagaacctgtctcaaaaaaaaaaaaagaaaaaaaaaattcagtctggg

SEQ ID NO: 3967 - DNA, 159 bp, Homo sapiens
aaaaaaaaaaaaaattgtggggaagagattgaaatctctgatgtagtataatgtgtatatataatagagcagccattcccattagggcccagtgctttgaggtgttgtagacaacataattagctgtgcaaaaaaaaattagaaagaaaagaaaaataa

SEQ ID NO: 3968 - DNA, 10907 bp, Homo sapiens
attcttggtaaattctaaacttcaacttctgttttaaggaaacacaaattcatccagtgttacaaattctgcagcaggtgttgaagatcttaacatcgttcaagtgactgttccaggtatggactaatgttacatttttccttttgtcttaattattttttgacataggctggtctcttggacctgtcatttttcacttagttcaccctgatagctaagaaatgacatttcgggaatataaaatattctgcaagttgctacacaacgagcatcttgctcacatcagacattattaatcggatattttgcttctcctggacaagcccgggcattacctggaaaatgcatctcagagcaggcagcacggagcaccagctatggttgaattggaattggccacagaggtgaaatgttttgttgctcatcattaacaatcttctggccgggcacggtggcttacgcctgtaatcccagcactttgggaggctaagacgggcagatcacgaggtcaggagatcgagaccatcctggataacacggtgaaaccctgtctctactaaaaatacaaaaaaattagccgggtgtggtggcgagcacctgtagtcccagctactcgggaggctgaggctgaagaatggcgtgaacctgggaggtggagcttgcagtgagcggagatcacaccactgcactccagcctgggtgacagagcgagactctgtctcaaaaaaataaataataataataataataatcttcttttctgaatatgtgtatgtaaaatatatctggaaagatacaagagaatctaattacatagttcctccagggaaggaaactgaccgctgagatagggataggagagagacgtttgagatgtttctgtatattactcctcttgaatgttgagccatgtgattgctttagttattcaaaagtaaataaagttttaaagtgttgaaaaatatctaaaaaataaaaacaaaaaaaaaggaccaggcatggtggcatgtgcctgtaatctcagcactttgggaagctgaggcaggaggatcacttgagcccaggagtttgagaccagcctgcacagcacagtgagactctgtctctaaaaaacaaaaagaaaagaaaaacagaccgggtgcggtggctcacacctgtaatcccagcactttgggaggctgaggcaggtggatcacctgaggtcaggagttcgagaccagcctggccaacatggtgaaaccccatctttactaaaaatacaaaaatcagctggtgtggtggtgggtgcctgtaatcccagctacttgggaggctgaggcaggagaattgcttgaacccaggaggggtgcagtgaattgcttgaacccaggagtttgcagtgagccaagattgtaccattgtactccagcctgggtgacaagagcaaaactcagcctcaaaacaaaacaaaacaaaacaaacaaacaaaaaaagagaggaaaaaaaggaaagaaaataaaaatataccttaccttctaatcctagtacctcttattccttttacttgtcatatttcattggctaagatttctattttaaggccgaaaagtggtggtgaaagtaaacatccttgtctttttttttttttttttttttttgagacggagtcttgctctgtcacccaggctggagtgcagtggcgcgatctcggctcactgcaagctccgcctcctgggttcacgccattctcctgcctcagcctcccgagtagctgggactacaggcgcctgccaccatgcccggctaaatttttgtatttttagtagaaacggggtttcaccatgttagccaggatggtctcaatctcctgacctcgtgatccacctgcctcggcctcccaaagtgctgggattacaggcgtgagccaccgcgcctggccctaaacatccttgtcttgtatgatattgaaaatattccttaaaagtagtatgtagtatgtttatatagggttataatttggaaaattctctattgtctgtaatggcttccatttccaaatttccaagatgcttaattattgctaaaagtagactgaataacaatccaggtaaagcactttctcgggtgctaacaggcatttctcccaacagctttcttgggagaaaatacattaataaccttggtttgtttatttgtttaattatttttagataatgagaaggaaagattatcaagcattgaaaagattaaacagctaagagaacaagttaatgacctctttagccgaaaatttggtaagtttttatatctttttatatccagaattcatatacctaaaatacttctttttaaaagaatacttggccaggtgcattggctcatacctgtaatcctagcactttaggaggctaaggctagagaatcacttgagcccaggagtttgagaccagcctgggcagcaaagtgacaccccaggtctacaaaaggaaaaaaacaaaactttatcttataagaatttgatcttggctgggcgcagtggttcacacttttaatcccagcactttgggaggccaaggtgtgtggatcacttgaggccaggagttcaagtccagcctggccaacatggcaaaatcccatctctactaaaaatacaaaaaaattagccgggtgtggtggcgcacacctgtaatcccagctactcaggaggctgaggcacgagaatcggttgtaactgggaggcagaggttgcagtgagcttagatcgcgctattgcactccagcctgggcgacagagtgagaccctgtctcaaaaaaaaaaaaaaaaaaagaaattgatctttttgtgaaagagctatgataaaaattagtcaatatgtctttttacagaagagcttttgcatggtatcattgactaattacaataataataataatagctatctttgttttactgagtgcttaccttgtatattattttttgtgctcaacatgtgtttgatcatttaatcctcacataaaacctttcaggtaggcgccatgataaccctgtgtaatggatggaggaactgagtttgcctactacccatgctaattccaaacttttaaaattatattcacacatcatagtagcactggaaaataaaatgactgatcataagtattgtcatttgatgcttctaaatcctgacattaaagaaaaatcctggtttaggaaacgtaaggaacaaactcagctagttttatttgtgttgttgtttttttaatttgttgttttgttttgtgttttgttttgaggcagggtctcgctctgtctctcaggctggagtgcagtggggcgatctcggctcactgcaacttctgcctcctgggtccctcccatgtggctgggattacaggcatgcgccaccacgcccagctaatttttgtatttttagtagagacagggtttcaccatgttagccaggctggtctcgaactcctggcctcaagtgattcacccgcctcagtctcccagagggctgggattacaggtgtgagccaccgtgcccagccaaactcagctggttttatgctgctcatcccgtcacaggtgaagcaattggcgtggatttccctgtgaaagttccctacaggaagatcacattcaaccctggctgtgtggtgattgatggcatgcccccgggggtggtattcaaggcccccggctatctggaaatcagttccatgaggaggatcttggaggcagctgagtttatcaaattcacagtcatcaggtaagtgagtcaaaagaaggaatctggagactctgacttgcccgaggtgggcatgtggctgcccaggaatgtctgtcccatgacttgggctgggggtttgttcccgcagctgaccgctgggccatgctgcctctcacactgacttcatcatcttctgcttccttgagatgtgtccatgtccctgttcctcggtgatcatgggcagcccgtcccagttttagctcacacagcacctagcgtagagttgatactctgcaaaaatttgtccaataaaactaagtggggccaggcacggtggctcacgcctgtaatcccagcactttgggaggctgaggcgggccagatcgcctgaggtcaggagtatgaggcaagcctggccaacatggtgaaaccccgttgctactgaaaatacaaacattagtcgggtgtggtggcgtgcgcctctaataccagctactcaggaggctgaggcgtgagaatcacttaacctgggaggtggaggttgcagtgacctgagatggcaccactgcactccagcctgggcagcagaatgagcctccatctcaaaacataaataaataggccgggcatggtggctcaggcctgtaatcccagcattttaggaggctgaggcaggtggatcatttgaggtcaggagtttgagaccagcctggccaacatggtgaaactccatctctactaaaaataaacattagctgggtgtagtggtacgtgcctgtaatcccagctactcaggagaatcacttgaacctggaatgtggaggttgcagtgagcccagatgacaccactgcactccagcctgggtgatggagtgagactccgtctcaaaaaaaacaaaaacaaaaggctcaacgcagtggctcatgcctgtaatcccagcactttgggaggccaaggtaggtagatctcctgatgtcaggagttcaagagtagcctggccaacatggtgaaactaaaaatacaaaaaattagctgggcgtggtggcgggcacctgtaatcccagctactcaggcggctgaggcaggagaatggcttgaacccaggaggcggaggttgcgctaagccgagatcgcgccactgcactccagcctgggtgacgcggcgagactcttgtctcaaaaaaaacaaaaacaaaacaaacaaataaataaatattcttctgtaaaaaaataaataagtaaaaattaaaaaaaaataaaactaagtgggcaaaagaggaaatgtgagcttgtcacatttatcaatgtgtctttctcttcaggccgcttccagggcttgagctcagtaatggtgagtattctacaggtgagaagaacgttccggcaatgttgggccatgggaagtgtcttggtgggcgctcaccacggggtttttgcttccgtgagcctgggacccaagtatgcagccttcgatgcatgctttatttttcctgcatgtgataaagttagataactctgttacttgagtttgattaaccagtctgaaggagagtgatctatatcacaccatgagtgtgacgtgtgatgtggcgcactcttttttttttttttggagacggagtctcgctctgtcacccaggctagagtgcaatggcacaatctcggctcaccacacaacctccgcctcccgggttcaagtgattctcctgcctcagcctcccgagtagctgggactataggcgtgtgccaccacgcctggctaatttttgtatttttagtagagatggggttttgccatgttggccaggctggtcttgaacttctgacctcaagggatctgcccgcctccaccttccaaagtgctgggattacgggcatgagccaccacgcatggctgatgtggcacactattcaagtgtgctttgtggtgggggctcccctgaggccacccgcacagctgcactcaggatcacagtaccgatctcctctgtgttagttggtaaatagtgcctgcctggccatgcagtcccaccctagtaccctccgaccgtggcttgacctccctacagtgctgaagcaaaaggggttccacctggcacagcagaggcccctagaacccttccagtgctgagactagcatctgttcttttttttttctttttttttttttttgagacagagtctcgctctctcacccaggctggagtgcagtggcaagatctcggctcactgcaacctccgcctcccgggttcaagcgattctctgcctcagccttccgattagctgggattacaggtgcgtgccgccacatccagctactttttgtattttttagtagagacagggtttagccatgttggccaggctggtctcaaactcgtgacctcaagtgatccacccgccttggtctcccaaactgctgggattacagatgtaagccactgcacctggctcagcatctgttctgattgagcaatgcccaggcactctgcttctgaaatattctcttttttttccccttcaacttttattttaagttccagggtccatgtgcaggatgtgcaggtttgttacacaggtaaacgtgtgccatggtggtttgctgcacctatcaacccatcacctaggtattaagcccagcatgcattagctattcttcctgatgctctccctccccccgcccccaccctgttaaatattcttaatgtcttccccggagcccttgcaagtgagtcagtatcctgtcaagtagaatacggagaggtgttctcacgagcatgagtcaccagggaacctcctaatgtaacatttgaaaaccaaagtaggctgggcgcggtgactcacacctgtaatcccagcactttgggaggccgaggcgggcggatcatgaggtcaggagatggagacccttctgtacaacgtggtgaaactccgtctctactagaaatacaaaaattagtcgggcatggtggcgcgtgcctataatcccagctactcgggaggctgaggcaggaaaatcacttgaaccagggagtcgggggttgcagtgagccgagatcgtgccactgcactccagtttggtgacagagcaagactctgtctcaaaaaaaaaaaaaaagaaaagaaaagaaaaccaaagtatcctattaaaatgctccatttttattcccaaacgcatctgattgctaaatgattttttgatcttttataatatctttatttatttattgtattattattggggttttttagagacaaggtctcactctgtcacccaggctggagtgcagtggcatgatcatagctcactgcagcctggaactcctgccctcaggtgattctcccaccttcacctcccgagtaactgggacagcactgccatgcccagataatttttttttttttttttttttgtagagacagggtctcactatgtttcccaggctggccttgagcttctggcttcaagcgatcctcctgcctcagcctcccaaagtgctgggattataggcatgagccgctgtacatggcctacattttcttaaggtgcacttttatgtgtgtgtactctggaaataccttgattacctgcagggtggccaggttctttaaatctaaaacactagcccctgtacactcgaacacacttatacgaatgagttttgtgtggttctgtggccgtcacccttgtcatttgagactcacagtaggtaaaaatcatatgcctttctgtgctcattcccatctctgttattacaaagttttcttgggaatcaaatgagaaaatatattaaaatgctcacacctataatcccaggacttttggaggccaaggcaagaggattgcttgaggccaggagtttgagaccagcctgggcaacatagcaagaccccatctctacaaaaaatttaaaaattagctggaaacagtggctcacacctgtagccccagctacttggcaggctaaagcaggaggatcacttaaactcaggagtttgagacagcagagaaccataattgcaatactacactccagcctgggtgacagaacaagaccctgtctctaaaaagaaaatgcaaacatattatcaaataattcctgtttaaactggacataacaagcacagctacatgctgaacctcatcaaaggtgtcttttgtttggctcatgtacttttgaaaataaggatgaggcctggcacggtggctcctgtaatcccagcactttgggaggccaaggcgggtggatcgcttgagcctggggtttcagaccagcctgggcaacaaggtaagactccagctctacaaaaaaaaaaaaaaaaagaaaaagaaaaaaagaaaagaaagaaagaaagaaaagatagctcggtgtggtgcatgcctgtagtcccagcaactgggagctgaagtgggaggatcacctgagcccagggagttccaggctgcaatgagtcattatcaccacaaaccaggcactctttcataaaagtcaatcttcaggttttctttagaaaacctgaagatctggctgggtgcagtggctcatgcttgtaatcccagcactttgggaggctgaggtgggcggatcacctgaggtcaggagttcgagaccagcctggacaacatggtgaaatctcatctctactaaaaatacaaaaattagctgggcgtggtggcaggcacctgtcataacagctactcaggaggctgaggcagaagaatcgcttgaacccaggaggcagaagttgcagtgagccgagattgcgccactgcactgcagcctgggcgacagagcaaaactccgtctcaacaacaacgacaacaaaaattcagtcttcaggttttctttagaaaacttgaagatctggccacagctggcatcctggcagcggtttgctggagttgagggtcagccgtccctctgcagggtgggtcaccctcctgttaaccacgccctgccccgccccgcttcctccctctcgtgcgtcatcaagcatttgctgttgttttcctcatagtagtgataagagaaaagtgaaatatctttgtctccctgtctctgtcaaaagtgggaaaacgcaagatagaccaggagggccgtgtgtttcaagaaaagtgggagagagcgtatttcttcgtggaagtacagaatattccaacatgtctcatatgcaaacaaagcatgtctgtgtccaaagaatataacctaagacgccactatcaaaccaatcacagcaagcattatgaccagtatatggaaagaatgcgtgacgagaagcttcacgagctgaaaaaagggctcaggaagtatctcttaggctcatcagacaccgagtgtcccgagcaaaaacaagtgtttgcaaacccaagtccaacccagaaatcccccgtgcagcctgtagaggacctagctgggaacttatgggagaagttacgtgaaaaaatcaggtcttttgtggcatattctatcgcaatcgatgagatcacggatataaataataccacccagttggccatattcatccgtggtgtcgatgagaatttcgatgtgtccgaagaacttctggacacggtgcccatgacgggtacaaaatctggcaacgagatcttttcgcgtgttgagaaaagcctgaaaaacttctgtatcgactggtcgaaattagtaagcgtggcctccactggcaccccagcgatggtggatgccaataacgggcttgtcacaaaactgaagtccagggtggcgacgttctgcaagggtgcggaactgaagtccatctgttgtataattcatccggaatcactctgtgctcagaagttgaagatggaccacgtcatggacgtggtagtgaagtccgtgaactggatatgctcccggggactgaaccacagtgagttcacaaccttgctctatgagctggacagccagtatggtagcctcctgtactacacggagattaagtggctcagtcgcgggctcgtgctaaagagatttttcgaatccttggaagaaatcgactccttcatgtcatccagagggaaacccctgcctcaactgagctccatagattggatccgagacctggccttcttggttgacatgacgatgcatctgaacgctttgaacatctctctccaaggacactcccaaatcgtcacgcagatgtatgacctgatccgggcgttcctagcaaaactgtgcctctgggagactcatttgacgaggaataatctggcccactttcccaccctgaaattggcttccagaaatgaaagcgatggcctgaactacattcccaaaatcgcggaactcaagaccgaattccagaaaaggctgtctgatttcaaactctacgaaagcgaactgactctgttcagctccccgttctccacgaagatcgacagtgtgcacgaggagctccagatggaggttatcgacctgcaatgcaacacggtcctgaagacgaaatacgacaaggtgggaataccagaattctacaagtacctctggggtagctacccgaaatacaagcaccattgcgcaaagattctttccatgttcgggagcacctacatctgcgaacagctgttctccattatgaaactgagcaaaacaaaatactgctcccagttaaaggattcccagtgggattctgtactccacatcgcaacgtgatggagagaaaactcctggcagggccctatggtgggaaaggctggagtcttctagtcccaagggattgggagatgacaaaatgaatttttttttcttttttgagatggagtcttgctctgtcgcccaggttggagtgcagtggcgtgatctcggcttactgcaacttccagctcctgggttcgaacgattctcctgcctcagcctcccgagcagctgggactacaggcgtgcgccaccatgcctggctaatttttgtattagtagagatgaggtttcaccatgttggccaggctggtctccaactcctgacctcaggtgatccacctgcctcgacctcacaaagtgctgggattacaggcatgaaccactgtgcccagctgacaaaatgagttcttaaacttttttttttttcagttttttttccactttgaatcagaaatataatctgcagtatcatacttgtttatattacattgtatgcctcactattcattaaaaatcaagaaagttttattgta

SEQ ID NO: 3969 - DNA, 160 bp, Homo sapiens
aaaaaaaaaaaaaaattgtggggaagagattgaaatctctaatgtagtataatgtatatatataatagagcagccattcccattagggcccaatgctttgaggtgttgtagacaacataattagctgtgcaaaaaaaaattagaaagaaaagaaaaataa

SEQ ID NO: 3970 - DNA, 10867 bp, Homo sapiens
ggaaacacaaattcatccagtgttacaaattctgcagcaggtgttgaagatcttaacatcgttcaagtgactgttccaggtatggactaatgttacatttttccttttgtcttaattattttttgacataggctggtctcttggacctgtcatttttcacttagttcaccctgatagctaagaaatgacatttcgggaatataaaatattctgcaagttgctacacaacgagcatcttgctcacatcagacattattaatcggatattttgcttctcctggacaagcccgggcattacctggaaaatgcatctcagagcaggcagcacggagcaccagctatggttgaattggaattggccacagaggtgaaatgttttgttgctcatcattaacaatcttctggccgggcacggtggcttacgcctgtaatcccagcactttgggaggctaagatgggcagatcacgaggtcaggagatcgagaccatcctggataacacggtgaaaccctgtctctactaaaaatacaaaaaaattagccgggtgtggtggcgagcacctgtagtcccagctactcgggaggctgaggctgaagaatggcatgaacctgggaggtggagcttgcagtgagcggagatcacaccactgcactccagcctgggcgacagagcgagactctgtctcaaaaaaataaataataataataataataatcttcttttctgaatatgtgtatgtaaaatatatctggaaagatacaagagaatctaattacatagttcctccagggaaggaaactgaccgctgagatagggataggagagagacgtttgagatgtttctgtatattactcctcttgaatgttgagccatgtgattgctttagttattcaaaagtaaataaagttttaaagtgttgaaaaatatctaaaaaataaaaacaaaaaaaaaggaccaggcatggtggcatgtgcctgtaatctcagcactttgggaagctgaggcaggaggatcacttgagcccaggagtttgagaccagcctgcacagcacagtgagactctgtctctaaaaaacaaaaagaaaagaaaaacagaccgggtgcggtggctcacacctgtaatcccagcactttgggaggctgaggcaggtggatcacctgaggtcaggagttcgagaccagcctggccaacatggtgaaaccccatctttactaaaaatacaaaaatcagctggtgtggtggtgggtgcctgtaatcccagctacttgggaggctgaggcaggagaattgcttgaacccaggaggggtgcagtgaattgcttgaacccaggagtttgcagtgagccaagattgtaccattgtactccagcctgggtgacaagagcaaaactcagcctcaaaacaaaacaaaacaaaacaaacaaacaaaaaaagagaggaaaaaaaggaaagaaaataaaaatataccttaccttctaatcctagtacctcttattccttttacttgtcatatttcattggctaagatttctattttaaggccgaaaagtggtggtgaaagtaaacatccttgtctttttttttttttttttttttttgagacggagtcttgctctgtcacccaggctggagtgcagtggcgcgatctcggctcactgcaagctccgcctcctgggttcacgccattctcctgcctcagcctcccgagtagctgggactacaggcgcctgccaccatgcccggctaaatttttgtatttttagtagaaacggggtttcaccgtgttagccaggatggtctcaatctcctgacctcgtgatccacctgcctcggcctcccaaagtgctgggattacaggcgtgagccaccgcgcctggccctaaacatccttgtcttgtatgatattgaaaatattccttaaaagtagtatgtagtatgtttatatagggttataatttggaaaattctctattgtctgtaatggcttccatttccaaatttccaagatgcttaattattgctaaaagtagactgaataacaatccaggtaaagcactttctcgggtgctaacaggcatttctcccaacagctttcttgggagaaaatacattaataaccttggtttgtttatttgtttaattatttttagataatgagaaggaaagattatcaagcattgaaaagattaaacagctaagagaacaagttaatgacctctttagccgaaaatttggtaagtttttatatctttttatatccagaattcatatacctaaaatacttctttttaaaagaatacttggccaggtgcattggctcatacctgtaatcctagcactttaggaggctaaggctagagaatcacttgagcccaggagtttgagaccagcctgggcagcaaagtgacaccccaggtctacaaaaggaaaaaaacaaaactttatcttataagaatttgatcttggctgggcgcagtggttcacacttttaatcccagcactttgggaggccaaggtgtgtggatcacttgaggccaggagttcaagtccagcctggccaacatggcaaaatcccatctctactaaaaatacaaaaaaattagccgggtgtggtggcgcacacctgtaatcccagctactcaggaggctgaggcacgagaatcggttgtaactgggaggcagaggttgcagtgagcttagatcgcgctattgcactccagcctgggcgacagagtgagaccctgtctcaaaaaaaaaaaaaaaaaaagaaattgatctttttgtgaaagagctatgataaaaattagtcaatatgtctttttacagaagagcttttgcatggtatcattgactaattacaataataataataatagctatctttgttttactgagtgcttaccttgtatattattttttgtgctcaacatgtgtttgatcatttaatcctcacataaaacctttcaggtaggcgccatgataaccctgtgtaatggatggaggaactgagtttgcctactacccatgctaattccaaacttttaaaattatattcacacatcatagtagcactggaaaataaaatgactgatcataagtattgtcatttgatgcttctaaatcctgacattaaagataaatcctggtttaggaaacgtaaggaacaaactcagctagttttatttgtgttgttgtttttttaatttgttgttttgttttgtgttttgttttgaggcagggtctcgctctgtctctcaggctggagtgcagtggggcgatctcggctcactgcaacttctgcctcctgggtccctcccatgtggctgggattacaggcatgcgccaccacgcccagctaatttttgtatttttagtagagacagggtttcaccatgttagccaggctggtctcgaactcctggcctcaagtgattcacccgcctcagtctcccagagggctgggattacaggtgtgagccaccgtgcccagccaaactcagctggttttatgctgctcatcccgtcacaggtgaagcaattggcgtggatttccctgtgaaagttccctacaggaagatcacattcaaccctggctgtgtggtgattgatggcatgcccccgggggtggtattcaaggcccccggctatctggaaatcagttccatgaggaggatcttggaggcagctgagtttatcaaattcacagtcatcaggtaagtgagtcaagagaaggaatctggagactctgacttgcccgaggtgggcatgtggctgcccaggaatgtctgtcccatgacttgggctgggggtttgttcccgcagctgaccgctgggccatgctgcctctcacactgacttcatcatcttctgcttccttgagatgtgtccatgtccctgttcctcggtgatcatgggcagcccgtcccagttttagctcacacagcacctagcgtagagttgatactctgcaaaaatttgtccaataaaactaagtggggccaggcacggtggctcacgcctgtaatcccagcactttgggaggctgaggcgggccagatcgcctgaggtcaggagtatgaggcaagcctggccaacatggtgaaaccccgttgctactgaaaatacaaacattagtcgggtgtggtggcgtgcgcctctaataccagctactcaggaggctgaggcgtgagaatcacttaacctgggaggtggaggttgcagtgacctgagatggcaccactgcactccagcctgggcagcagaatgagcctccatctcaaaacataaataaataggccgggcatggtggctcaggcctgtaatcccagcattttaggaggctgaggcaggtggatcatttgaggtcaggagtttgagaccagcctggccaacatggtgaaactccatctctactaaaaataaacattagctgggtgtagtggtacgtgcctgtaatcccagctactcaggagaatcacttgaacctggaatgtggaggttgcagtgagcccagatgacaccactgcactccagcctgggtgatggagtgagactccgtctcaaaaaaaacaaaaacaaaaggctcaacgcagtggctcatgcctgtaatcccagcactttgggaggccaaggtaggtagatctcctgatgtcaggagttcaagagtagcctggccaacatggtgaaactaaaaatacaaaaaattagctgggcgtggtggcgggcacctgtaatcccagctactcaggcggctgaggcaggagaatggcttgaacccaggaggcggaggttgcactaagccgagatcgagccactgcactccagcctgggtgacgcggcgagactcttgtctcaaaaaaaacaaaaacaaaacaaacaaataaataaatattcttctgtaaaaaaataaataagtaaaaattaaaaaaaaataaaactaagtgggcaaaagaggaaatgtgagcttgtcacatttatcaatgtgtctttctcttcaggccgcttccagggcttgagctcagtaatggtgagtattctacaggtgagaagaacgttccggcaatgttgggccatgggaagtgtcttggtgggcgctcaccacggggtttttgcttccgtgagcctgggacccaagtatgcagccttcgatgcatgctttatttttcctgcatgtgataaagttagataactctgttacttgagtttgattaaccagtctgaaggagagtgatctatatcacaccatgagtgtgacgtgtgatgtggcgcactcttttttttttttttggagacggagtctcgctctgtcacccaggctagagtgcaatggcacaatctcggctcaccacacaacctccgcctcccgggttcaagtgattctcctgcctcagcctcccgagtagctgggactataggcgtgtgccaccacgcctggctaatttttgtatttttagtagagatggggttttgccatgttggccaggctggtcttgaacttctgacctcaagggatctgcccgcctccaccttccaaagtgctgggattacgggcatgagccaccacgcatggctgatgtggcacactattcaagtgtgctttgtggtgggggctcccctgaggccacccgcacagctgcactcaggatcacagtaccgatctcctctgtgttagttggtaaatagtgcctgcctggccatgcagtcccaccctagtaccctccgaccgtggcttgacctccctacagtgctgaagcaaaaggggttccacctggcacagcagaggcccctagaacccttccagtgctgagactagcatctgttcttttctttttctttttttttttttttgagacagagtctcgctctctcacccaggctggagtgcagtggcaagatctcggctcactgcaacctccgcctcccgggttcaagcgattctctgcctcagccttccgattagctgggattacaggtgcgtgccgccacatccagctactttttgtattttttagtagagacagggtttagccatgttggccaggctggtctcaaactcgtgacctcaagtgatccacccgccttggtctcccaaactgctgggattacagatgtaagccactgcacctggctcagcatctgttctgattgagcaatgcccaggcactctgcttctgaaatattctcttttttttccccttcaacttttattttaagttccagggtccatgtgcaggatgtgcaggtttgttacacaggtaaacgtgtgccatggtggtttgctgcacctatcaacccatcacctaggtattaagcccagcatgcattagctattcttcctgatgctctccctccccccgcccccaccctgttaaatattcttaatgtcttccccggagcccttgcaagtgagtcagtatcctgtcaagtagaatacggagaggtgttctcacgagcatgagtcaccagggaacctcctaatgtaacatttgaaaaccaaagtaggctgggcgcggtgactcacacctgtaatcccagcactttgggaggccgaggcgggcggatcatgaggtcaggagatggagacccttctgtacaacgtggtgaaactccgtctctactagaaatacaaaaattagtcgggcatggtggcgcgtgcctataatcccagctactcgggaggctgaggcaggaaaatcacttgaaccagggagtcgggggttgcagtgagccgagatcgtgccactgcactccagtttggtgacagagcaagactctgtctcaaaaaaaaaaaaaaagaaaagaaaagaaaaccaaagtatcctattaaaatgctccatttttattcccaaacgcatctgattgctaaatgattttttgatcttttataatatctttatttatttattgtattattattggggttttttagagacaaggtctcactctgtcacccaggctggagtgcagtggcatgatcatagctcactgcagcctggaactcctgccctcaggtgattctcccaccttcacctcccgagtaactgggacagcactgccatgcccagataatttttttttttttttttttttttgtagagacagggtctcactatgtttcccaggctggccttgagcttctggcttcaagcgatcctcctgcctcagcctcccaaagtgctgggattataggcatgagccgctgtacatggcctacattttcttaaggtgcacttttatgtgtgtgtactctggaaataccttgattacctgcagggtggccaggttctttaaatctaaaacactagcccctgtacactcgaacacacttatacgaatgagttttgtgtggttctgtggccgtcacccttgtcatttgagactcacagtaggtaaaaatcatatgcctttctgtgctcattcccatctctgttattacaaagttttcttgggaatcaaatgagaaaatatattaaaatgctcacacctataatcccaggacttttggaggccaaggcaagaggattgcttgaggccaggagtttgagaccagcctgggcaacatagcaagaccccatctctacaaaaaatttaaaaattagctggaaacagtggctcacacctgtagccccagctacttggcaggctaaagcaggaggatcacttaaactcaggagtttgagacagcagagaaccataattgcaatactacactccagcctgggtgacagaacaagaccctgtctctaaaaagaaaatgcaaacatattatcaaataattcctgtttaaactggacataacaagcacagctacatgctgaacctcatcaaaggtgtcttttgtttggctcatgtacttttgaaaataaggatgaggcctggcacggtggctcctgtaatcccagactttgggaggccaaggcggtgatcgcttgagcctgggtttcagaccagcctggcaacaaggtaagactccagctctacaaaaaaaaaaaaaaaagaaaaagaaaaaaagaaaagaaagaaagaaagaaaagatagctcggtgtggtgcatgcctgtagtcccagcaactgggagctgaagtgggaggatcacctgagcccagggagttccaggctgcaatgagtcattatcaccacaaaccaggcactctttcataaaagtcaatcttcaggttttctttagaaaacctgaagatctggctgggtgcagtggctcatgcctgtaatcccagcactttgggaggctgaggtgggcggatcacctgaggtcaggagttcgagaccagcctggacaacatggtgaaatctcatctctactaaaaatacaaaaattagctgggcgtggtggcaggcacctgtcataacagctactcaggaggctgaggcagaagaatcgcttgaacccaggaggcagaagttgcagtgagccgagattgcgccactgcactgcagcctgggcgacagagcaaaactccgtctcaacaacaacgacaacaaaaattcagtcttcaggttttctttagaaaacttgaagatctggccacagctggcatcctggcagcggtttgctggagttgagggtcagccgtccctctgcagggtgggtcaccctcctgttaaccacgccctgccccgccccgcttcctccctctcgtgcgtcatcaagcatttgctgttgttttcctcatagtagtgataagagaaaagtgaaatatctttgtctccctgtctctgtcaaaagtgggaaaacgcaagatagaccaggagggccgtgtgtttcaagaaaagtgggagagagcgtatttcttcgtggaagtacagaatattccaacatgtctcatatgcaaacaaagcatgtctgtgtccaaagaatataacctaagacgccactatcaaaccaatcacagcaagcattatgaccagtatatggaaagaatgcgtgacgagaagcttcacgagctgaaaaaagggctcaggaagtatctcttaggcttgtcagacaccgagtgtcccgagcaaaaacaagtgtttgcaaacccaagtccaacccagaaatcccccgtgcagcctgtagaggacctagctgggaacttatgggagaagttacgtgaaaaaatcaggtcttttgtggcatattctatcgcaatcgatgagatcacggatataaataataccacccagttggccatattcatccgtggtgtcgatgagaatttcgatgtgtccgaagaacttctggacacggtgcccatgacgggtacaaaatctggcaacgagatcttttcgcgtgttgagaagagcctgaaaaagttctgtatcgactggtcgaaattagtaagcgtggcctccactggcaccccagcgatggtggatgccaataacgggcttgtcacaaaactgaagtccagggtggcgacgttctgcaagggtgcggaactgaagtccatctgttgtataattcatccggaatcactctgtgctcagaagttgaagatggaccacgtcatggacgtggtagtgaagtccgtgaactggatatgctcccggggactgaaccacagtgagttcacaaccttgctctatgagctggacagccagtatggtagcctcctgtactacacggagattaagtggctcagtcgcgggctcgtgctaaagagatttttcgaatccttggaagaaatcgactccttcatgtcatccagagggaaacccctgcctcaactgagctccatagattggatccgagacctggccttcttggttgacatgacgatgcatctgaacgctttgaacatctctctccaaggacactcccaaatcgtcacgcagatgtatgacctgatccgggcgttcctagcaaaactgtgcctctgggagactcatttgacgaggaataatctggcccactttcccaccctgaaattggcttccagaaatgaaagcgatggcctgaactacattcccaaaatcgcggaactcaagaccgaattccagaaaaggctgtctgatttcaaactctacgaaagcgaactgactctgttcagctccccgttctccacgaagatcgacagtgtgcacgaggagctccagatggaggttatcgacctgcaatgcaacacggtcctgaagacgaaatacgacaaggtgggaataccagaattctacaagtacctctggggtagctacccgaaatacaagcaccattgcgcaaagattctttccatgttcgggagcacctacattctgcgaacagctgttctccattatgaaactgagcaaaacaaaatactgctcccagttaaaggattcccagtgggattctgtactccacatcgcaacgtgatggagagaaaactcctggcagggccctatggtgggaaaggctggagtcttctagtcccaagggattgggagatgacaaaatgaatttttttttcttttttgagatggagtcttgctctgtcgcccaggttggagtgcagtggcgtgatctcggcttactgcaacttccagctcctgggttcgaacgattctcctgcctcagcctcccgagcagctgggactacaggcgtgcgccaccatgcctggctaatttttgtattagtagagatgaggtttcaccatgttggccaggctggtctccaactcctgacctcaggtgatccacctgcctcgacctcacaaagtgctgggattacaggcatgaaccactgtgcccagctgacaaaatgagttcttaaacttttttttttttcagttttttttccactttgaatcagaaatataatctgcagtatcatacttgtttatattacattgtatgcctcactattcattaaaaatcaagaaagttttattgta

SEQ ID NO: 3971 - DNA, 163 bp, Homo sapiens
aaaaaaaaaaaaaaaaaattgtggggaagagattgaaatctctaatgtagtataatgtgtatatataatagagcagccattcccattagggcccaatgctttgaggtgttgtagacaacataattagctgtgcaaaaaaaaattagaaagaaaagaaaaataa

SEQ ID NO: 3972 - DNA, 12718 bp, Homo sapiens
attcttggtaaattctaaacttcaacttctgttttaaggaaacacaaattcatccagtgttacaaattctgcagcaggtgttgaagatcttaacatcgttcaagtgactgttccaggtatggactaatgttacatttttccttttgtcttaattattttttgacataggctggtctcttggacctgtcatttttcacttagttcaccctgatagctaagaaatgacatttcgggaatataaaatattctgcaagttgctacacaacgagcatcttgctcacatcagacattattaatcggatattttgcttctcctggacaagcccgggcattacctggaaaatgcatctcagagcaggcagcacggagcaccagctatggttgaattggaattggccacagaggtgaaatgttttgttgctcatcattaacaatcttctggccgggcacggtggcttacgcctgtaatcccagcactttgggaggctaagatgggcagatcacgaggtcaggagatcgagaccatcctggataacacggtgaaaccctgtctctactaaaaatacaaaaaaattagccgggtgtggtggcgagcacctgtagtcccagctactcgggaggctgaggctgaagaatggcatgaacctgggaggtggagcttgcagtgagcggagatcacaccactgcactccagcctgggcgacagagcgagactctgtctcaaaaaaataaataataataataataataatcttcttttctgaatatgtgtatgtaaaatatatctggaaagatacaagagaatctaattacatagttcctccagggaaggaaactgaccgctgagatagggataggagagagacgtttgagatgtttctgtatattactcctcttgaatgttgagccatgtgattgctttagttattcaaaagtaaataaagttttaaagtgttgaaaaatatctaaaaaataaaaacaaaaaaaaaggaccaggcatggtggcatgtgcctgtaatctcagcactttgggaagctgaggcaggaggatcacttgagcccaggagtttgagaccagcctgcacagcacagtgagactctgtctctaaaaaacaaaaagaaaagaaaaacagaccgggtgcggtggctcacacctgtaatcccagcactttgggaggctgaggcaggtggatcacctgaggtcaggagttcgagaccagcctggccaacatggtgaaaccccatctttactaaaaatacaaaaatcagctggtgtggtggtgggtgcctgtaatcccagctacttgggaggctgaggcaggagaattgcttgaacccaggaggggtgcagtgaattgcttgaacccaggagtttgcagtgagccaagattgtaccattgtactccagcctgggtgacaagagcaaaactcagcctcaaaacaaaacaaaacaaaacaaacaaacaaaaaaagagaggaaaaaaaggaaagaaaataaaaatataccttaccttctaatcctagtacctcttattccttttacttgtcatatttcattggctaagatttctattttaaggccgaaaagtggtggtgaaagtaaacatccttgtctttttttttttttttttttttttgagacggagtcttgctctgtcacccaggctggagtgcagtggcgcgatctcggctcactgcaagctccgcctcctgggttcacgccattctcctgcctcagcctcccgagtagctgggactacaggcgcctgccaccatgcccggctaaatttttgtatttttagtagaaacggggtttcaccgtgttagccaggatggtctcaatctcctgacctcgtgatccacctgcctcggcctcccaaagtgctgggattacaggcgtgagccaccgcgcctggccctaaacatccttgtcttgtatgatattgaaaatattccttaaaagtagtatgtagtatgtttatatagggttataatttggaaaattctctattgtctgtaatggcttccatttccaaatttccaagatgcttaattattgctaaaagtagactgaataacaatccaggtaaagcactttctcgggtgctaacaggcatttctcccaacagctttcttgggagaaaatacattaataaccttggtttgtttatttgtttaattatttttagataatgagaaggaaagattatcaagcattgaaaagattaaacagctaagagaacaagttaatgacctctttagccgaaaatttggtaagtttttatatctttttatatccagaattcatatacctaaaatacttctttttaaaagaatacttggccaggtgcattggctcatacctgtaatcctagcactttaggaggctaaggctagagaatcacttgagcccaggagtttgagaccagcctgggcagcaaagtgacaccccaggtctacaaaaggaaaaaaacaaaactttatcttataagaatttgatcttggctgggcgcagtggttcacacttttaatcccagcactttgggaggccaaggtgtgtggatcacttgaggccaggagttcaagtccagcctggccaacatggcaaaatcccatctctactaaaaatacaaaaaaattagccgggtgtggtggcgcacacctgtaatcccagctactcaggaggctgaggcacgagaatcggttgtaactgggaggcagaggttgcagtgagcttagatcgcgctattgcactccagcctgggcgacagagtgagaccctgtctcaaaaaaaaaaaaaaaaaaagaaattgatctttttgtgaaagagctatgataaaaattagtcaatatgtctttttacagaagagcttttgcatggtatcattgactaattacaataataataataatagctatctttgttttactgagtgcttaccttgtatattattttttgtgctcaacatgtgtttgatcatttaatcctcacataaaacctttcaggtaggcgccatgataaccctgtgtaatggatggaggaactgagtttgcctactacccatgctaattccaaacttttaaaattatattcacacatcatagtagcactggaaaataaaatgactgatcataagtattgtcatttgatgcttctaaatcctgacattaaagataaatcctggtttaggaaacgtaaggaacaaactcagctagttttatttgtgttgttgtttttttaatttgttgttttgttttgtgttttgttttgaggcagggtctcgctctgtctctcaggctggagtgcagtggggcgatctcggctcactgcaacttctgcctcctgggtccctcccatgtggctgggattacaggcatgcgccaccacgcccagctaatttttgtatttttagtagagacagggtttcaccatgttagccaggctggtctcgaactcctggcctcaagtgattcacccgcctcagtctcccagagggctgggattacaggtgtgagccaccgtgcccagccaaactcagctggttttatgctgctcatcccgtcacaggtgaagcaattggcgtggatttccctgtgaaagttccctacaggaagatcacattcaaccctggctgtgtggtgattgatggcatgcccccgggggtggtattcaaggcccccggctatctggaaatcagttccatgaggaggatcttggaggcagctgagtttatcaaattcacagtcatcaggtaagtgagtcaagagaaggaatctggagactctgacttgcccgaggtgggcatgtggctgcccaggaatgtctgtcccatgacttgggctgggggtttgttcccgcagctgaccgctgggccatgctgcctctcacactgacttcatcatcttctgcttccttgagatgtgtccatgtccctgttcctcggtgatcatgggcagcccgtcccagttttagctcacacagcacctagcgtagagttgatactctgcaaaaatttgtccaataaaactaagtggggccaggcacggtggctcacgcctgtaatcccagcactttgggaggctgaggcgggccagatcgcctgaggtcaggagtatgaggcaagcctggccaacatggtgaaaccccgttgctactgaaaatacaaacattagtcgggtgtggtggcgtgcgcctctaataccagctactcaggaggctgaggcgtgagaatcacttaacctgggaggtggaggttgcagtgacctgagatggcaccactgcactccagcctgggcagcagaatgagcctccatctcaaaacataaataaataggccgggcatggtggctcaggcctgtaatcccagcattttaggaggctgaggcaggtggatcatttgaggtcaggagtttgagaccagcctggccaacatggtgaaactccatctctactaaaaataaacattagctgggtgtagtggtacgtgcctgtaatcccagctactcaggagaatcacttgaacctggaatgtggaggttgcagtgagcccagatgacaccactgcactccagcctgggtgatggagtgagactccgtctcaaaaaaaacaaaaacaaaaggctcaacgcagtggctcatgcctgtaatcccagcactttgggaggccaaggtaggtagatctcctgatgtcaggagttcaagagtagcctggccaacatggtgaaactaaaaatacaaaaaattagctgggcgtggtggcgggcacctgtaatcccagctactcaggcggctgaggcaggagaatggcttgaacccaggaggcggaggttgcactaagccgagatcgagccactgcactccagcctgggtgacgcggcgagactcttgtctcaaaaaaaacaaaaacaaaacaaacaaataaataaatattcttctgtaaaaaaataaataagtaaaaattaaaaaaaaataaaactaagtgggcaaaagaggaaatgtgagcttgtcacatttatcaatgtgtctttctcttcaggccgcttccagggcttgagctcagtaatggtgagtattctacaggtgagaagaacgttccggcaatgttgggccatgggaagtgtcttggtgggcgctcaccacggggtttttgcttccgtgagcctgggacccaagtatgcagccttcgatgcatgctttatttttcctgcatgtgataaagttagataactctgttacttgagtttgattaaccagtctgaaggagagtgatctatatcacaccatgagtgtgacgtgtgatgtggcgcactcttttttttttttttggagacggagtctcgctctgtcacccaggctagagtgcaatggcacaatctcggctcaccacacaacctccgcctcccgggttcaagtgattctcctgcctcagcctcccgagtagctgggactataggcgtgtgccaccacgcctggctaatttttgtatttttagtagagatggggttttgccatgttggccaggctggtcttgaacttctgacctcaagggatctgcccgcctccaccttccaaagtgctgggattacgggcatgagccaccacgcatggctgatgtggcacactattcaagtgtgctttgtggtgggggctcccctgaggccacccgcacagctgcactcaggatcacagtaccgatctcctctgtgttagttggtaaatagtgcctgcctggccatgcagtcccaccctagtaccctccgaccgtggcttgacctccctacagtgctgaagcaaaaggggttccacctggcacagcagaggcccctagaacccttccagtgctgagactagcatctgttcttttctttttctttttttttttttttgagacagagtctcgctctctcacccaggctggagtgcagtggcaagatctcggctcactgcaacctccgcctcccgggttcaagcgattctctgcctcagccttccgattagctgggattacaggtgcgtgccgccacatccagctactttttgtattttttagtagagacagggtttagccatgttggccaggctggtctcaaactcgtgacctcaagtgatccacccgccttggtctcccaaactgctgggattacagatgtaagccactgcacctggctcagcatctgttctgattgagcaatgcccaggcactctgcttctgaaatattctcttttttttccccttcaacttttattttaagttccagggtccatgtgcaggatgtgcaggtttgttacacaggtaaacgtgtgccatggtggtttgctgcacctatcaacccatcacctaggtattaagcccagcatgcattagctattcttcctgatgctctccctccccccgcccccaccctgttaaatattcttaatgtcttccccggagcccttgcaagtgagtcagtatcctgtcaagtagaatacggagaggtgttctcacgagcatgagtcaccagggaacctcctaatgtaacatttgaaaaccaaagtaggctgggcgcggtgactcacacctgtaatcccagcactttgggaggccgaggcgggcggatcatgaggtcaggagatggagacccttctgtacaacgtggtgaaactccgtctctactagaaatacaaaaattagtcgggcatggtggcgcgtgcctataatcccagctactcgggaggctgaggcaggaaaatcacttgaaccagggagtcgggggttgcagtgagccgagatcgtgccactgcactccagtttggtgacagagcaagactctgtctcaaaaaaaaaaaaaaagaaaagaaaagaaaaccaaagtatcctattaaaatgctccatttttattcccaaacgcatctgattgctaaatgattttttgatcttttataatatctttatttatttattgtattattattggggttttttagagacaaggtctcactctgtcacccaggctggagtgcagtggcatgatcatagctcactgcagcctggaactcctgccctcaggtgattctcccaccttcacctcccgagtaactgggacagcactgccatgcccagataatttttttttttttttttttttttgtagagacagggtctcactatgtttcccaggctggccttgagcttctggcttcaagcgatcctcctgcctcagcctcccaaagtgctgggattataggcatgagccgctgtacatggcctacattttcttaaggtgcacttttatgtgtgtgtactctggaaataccttgattacctgcagggtggccaggttctttaaatctaaaacactagcccctgtacactcgaacacacttatacgaatgagttttgtgtggttctgtggccgtcacccttgtcatttgagactcacagtaggtaaaaatcatatgcctttctgtgctcattcccatctctgttattacaaagttttcttgggaatcaaatgagaaaatatattaaaatgctcacacctataatcccaggacttttggaggccaaggcaagaggattgcttgaggccaggagtttgagaccagcctgggcaacatagcaagaccccatctctacaaaaaatttaaaaattagctggaaacagtggctcacacctgtagccccagctacttggcaggctaaagcaggaggatcacttaaactcaggagtttgagacagcagagaaccataattgcaatactacactccagcctgggtgacagaacaagaccctgtctctaaaaagaaaatgcaaacatattatctttttttttttttttttttttttttttttttttttttttccttttttttttttttttttttttttttattatactctaagttttagggtacatgtgcacattgtgcaggttagttacatatgtatacatgtgccatgctggtgcgctgcacccactaatgtgtcatctagcattaggtatatctcccaatgctatccctcccccctcccccgaccccaccacagtccccagagtgtgatattccccttcctgtgtccatgtgatctcattgttcaattcccacctatgagtgagaatatgcggtgtttggttttttgttcttgcgatagtttactgagaatgatggtttccaatttcatccatgtccctacaaaggatatgaactcatcattttttatggctgcatagtattccatggtgtatatgtgccacattttcttaatccagtctatcattgttggacatttgggttggttccaagtctttgctattgtgaatagtgccgcaataaacatacgtgtgcatgtgtctttatagcagcatgatttatactcatttgggtatatacccagtaatgggatggctgggtcaaatggtatttctagttctagatccctgaggaatcgccacactgacttccacaatggttgaactagtttacagtcccaccaacagtgtaaaagtgttcctatttctccgcatcctctccagcacctgttgtttcctgactttttaatgattgccattctaactggtgtgagatgatatctcatagtggttttgatttgcatttctctgatggccagtgatgatgagcatttcttcatgtgttttttggctgcataaatgtcttcttttgagaagtgtctgttcatgtccttcgcccactttttgatggggttgtttgtttttttcttgtaaatttgtttgagttcattgtagattctggatattagccctttgtcagatgagtaggttgcgaaaattttctcccatgttgtaggttgcctgttcactctgatggtagtttcttttgctgtgcagaagctctttaaaatacctaggaatccaacttacaagggatgtgaaggacctcttcaaggagaactacaaaccactgctcaaggaaataaaagaggacacaaacaaatggaagaacattccatgctcatgggtaggaagaatcaatatcgtgaaaatggccatactgcccaaggtaatttacagattcaatgccatccccatcaagctaccaatgactttcttcacagaattggaaaaaactactttaaagttcatatggaaccaaaaaagagcccgcattgccaagtcaatcctaagccaaaagaacaaagctggaggcatcacactacctgacttcaaactatactacaaggctacagtaaccaaaacagcatggtactggtaccaaaacagagatatagatcaatggaacagaacagagccctcagaaataatgccgcatatctacaactatctgatctttgacaaacctgagaaaaacaagcaatggggaaaggattccctatttaataaatggtgctgggaaaactggctagccatatgtagaaagctgaaactggatcccttccttacaccttatacaaaaatcaattcaagatggattaaagatttaaacgttaaacctaaaaccataaaaaccctagaagaaaacctaggcattaccattcaggacataggcgtgggcaaggacttcatgtccaaaacaccaaaagcaatggcaacaaaagacaaaattgacaaatgggatctaattaaacatattatcaaataattcctgtttaaactggacataacaagcacagctacatgctgaacctcatcaaaggtgtcttttgtttggctcatgtacttttgaaaataaggatgaggcctggcacggtggctcctgtaatcccagcactttgggaggccaaggcgggtggatcgcttgagcctggggtttcagaccagcctgggcaacaaggtaagactccagctctacaaaaaaaaaaaaaaaagaaaaagaaaaaaagaaaagaaagaaagaaagaaaagatagctcggtgtggtgcatgcctgtagtcccagcaactgggagctgaagtgggaggatcacctgagcccagggagttccaggctgcaatgagtcattatcaccacaaaccaggcactctttcataaaagtcaatcttcaggttttctttagaaaacctgaagatctggctgggtgcagtggctcatgcctgtaatcccagcactttgggaggctgaggtgggcggatcacctgaggtcaggagttcgagaccagcctggacaacatggtgaaatctcatctctactaaaaatacaaaaattagctgggcgtggtggcaggcacctgtcataacagctactcaggaggctgaggcagaagaatcgcttgaacccaggaggcagaagttgcagtgagccgagattgcgccactgcactgcagcctgggcgacagagcaaaactccgtctcaacaacaacgacaacaaaaattcagtcttcaggttttctttagaaaacttgaagatctggccacagctggcatcctggcagcggtttgctggagttgagggtcagccgtccctctgcagggtgggtcaccctcctgttaaccacgccctgccccgccccgcttcctccctctcgtgcgtcatcaagcatttgctgttgttttcctcatagtagtgataagagaaaagtgaaatatctttgtctccctgtctctgtcaaaagtgggaaaacgcaagatagaccaggagggccgtgtgtttcaagaaaagtgggagagagcgtatttcttcgtggaagtacagaatattccaacatgtctcatatgcaaacaaagcatgtctgtgtccaaagaatataacctaagacgccactatcaaaccaatcacagcaagcattatgaccagtatatggaaagaatgcgtgacgagaagcttcacgagctgaaaaaagggctcaggaagtatctcttaggcttgtcagacaccgagtgtcccgagcaaaaacaagtgtttgcaaacccaagtccaacccagaaatcccccgtgcagcctgtagaggacctagctgggaacttatgggagaagttacgtgaaaaaatcaggtcttttgtggcatattctatcgcaatcgatgagatcacggatataaataataccacccagttggccatattcatccgtggtgtcgatgagaatttcgatgtgtccgaagaacttctggacacggtgcccatgacgggtacaaaatctggcaacgagatcttttcgcgtgttgagaagagcctgaaaaagttctgtatcgactggtcgaaattagtaagcgtggcctccactggcaccccagcgatggtggatgccaataacgggcttgtcacaaaactgaagtccagggtggcgacgttctgcaagggtgcggaactgaagtccatctgttgtataattcatccggaatcactctgtgctcagaagttgaagatggaccacgtcatggacgtggtagtgaagtccgtgaactggatatgctcccggggactgaaccacagtgagttcacaaccttgctctatgagctggacagccagtatggtagcctcctgtactacacggagattaagtggctcagtcgcgggctcgtgctaaagagatttttcgaatccttggaagaaatcgactccttcatgtcatccagagggaaacccctgcctcaactgagctccatagattggatccgagacctggccttcttggttgacatgacgatgcatctgaacgctttgaacatctctctccaaggacactcccaaatcgtcacgcagatgtatgacctgatccgggcgttcctagcaaaactgtgcctctgggagactcatttgacgaggaataatctggcccactttcccaccctgaaattggcttccagaaatgaaagcgatggcctgaactacattcccaaaatcgcggaactcaagaccgaattccagaaaaggctgtctgatttcaaactctacgaaagcgaactgactctgttcagctccccgttctccacgaagatcgacagtgtgcacgaggagctccagatggaggttatcgacctgcaatgcaacacggtcctgaagacgaaatacgacaaggtgggaataccagaattctacaagtacctctggggtagctacccgaaatacaagcaccattgcgcaaagattctttccatgttcgggagcacctacatctgcgaacagctgttctccattatgaaactgagcaaaacaaaatactgctcccagttaaaggattcccagtgggattctgtactccacatcgcaacgtgatggagagaaaactcctggcagggccctatggtgggaaaggctggagtcttctagtcccaagggattgggagatgacaaaatgaatttttttttcttttttgagatggagtcttgctctgtcgcccaggttggagtgcagtggcgtgatctcggcttactgcaacttccagctcctgggttcgaacgattctcctgcctcagcctcccgagcagctgggactacaggcgtgcgccaccatgcctggctaatttttgtattagtagagatgaggtttcaccatgttggccaggctggtctccaactcctgacctcaggtgatccacctgcctcgacctcacaaagtgctgggattacaggcatgaaccactgtgcccagctgacaaaatgagttcttaaacttttttttttttcagttttttttccactttgaatcagaaatataatctgcagtatcatacttgtttatattacattgtatgcctcactattcattaaaaatcaagaaagttttattgta

SEQ ID NO: 3973 - DNA, 163 bp, Homo sapiens; identical to SEQ ID NO: 3971

SEQ ID NO: 3974 - DNA, 1188 bp, Homo sapiens
aggttcttattcatctgtagagaacaaatttccagtattttcgattttttgcttattttatatatcaaatagaccattaaagaatgttctataaacatttttaaattccaattttcaccaggggaggaatatgtgatatgagtggaatggcaaaaggaaaataaatccacctcaaattcattgattccaatgagaaatgtctatcttttaaatcaagagtaatactattgttaactataccttatgtttttgtatagtttgtttttaaatttagaatattttttccatcttgctctgagcttcctgaccgatagtatataagtaaaaaaaatgcatttatgctacttatttatatcttgtaattcctacacattgaacccttttccccttcttaaccttgtccgtctgcctgagtctttcccaaaacagatagttcctaggcctgtatggtgttaaataacacggtgaggaatttcagtaggttatctccagcaatctgtcttttgggagctatagtgcaaaggccaaagcccattactataaagaccctcttggaggactaagaaggaagatactaattatgataaaggaactataaaacttttaacctcaacagaatttgtaatgtcagaactggagaaattaaaatcagtattaaattttttaattcctaaaataatatatgcatggttgaagagttaaaaacaagtaactttgagagcacagtatgagataaataaaaaaggctaagaatacatgatgaggcacattccccttctgaggagaaagcgaaataacatgtctgtgcattgacccattcattacatttcatgtatcttaagcaaaagagcatgattttctctcattgctaaaaagagttgctttaactcatccctggatttggtggggaaagggtacaactcctgatttgctgtttcactttgaaacaacacaatttgttagatacttagggagatatactgttgaatttgcacaggatgtgactctgtttatacatattaacaaatttccttttggattccttagcagttcatcaaattagtattaaatttttaaatttaaaactagcatgaagggacatgaaatatttgcagtaggtggatctatgtaagatgtttgggtatggcattaatagcttgacaaagatttggggaaaggtgttaagaa

SEQ ID NO: 3975 - DNA, 3503 bp, Homo sapiens
aggttcttattcatctgtagagaacaaatttccagtattttcgattttttgcttattttatatatcaaatagaccattaaagaatgttctataaacatttttaaattccaattttcaccaggggaggaatatgtgatatgagtggaatggcaaaaggaaaataaatccacctcaaattcattgattccaatgagaaatgtctatcttttaaatcaagagtaatactattgttaactataccttatgtttttgtatagtttgtttttaaatttagaatattttttccatcttgctctgagcttcctgaccgatagtatataagtaaaaaaaatgcatttatgctacttatttatatcttgtaattcctacacattgaacccttttccccttcttaaccttgtccgtctgcctgagtctttcccaaaacagatagttcctaggcctgtatggtgttaaataacacggtgaggaatttcagtaggttatctccagcaatctgtcttttgggagctatagtgcaaaggccaaagcccattactataaagaccctcttggaggactaagaaggaagatactaattatgataaaggaactataaaacttttaacctcaacagaatttgtaatgtcagaactggagaaattaaaatcagtattaaattttttaattcctaaaataatatatgcatggttgaagagttaaaaacaagtaactttgagagcacagtatgagataaataaaaaaggctaagaatacatgatgaggcacattccccttctgaggagaaagcgaaataacatgtctgtgcattgacccattcattacatttcatgtatcttaagcaaaagagcatgattttctctcattgctaaaaagagttgctttaactcatccctggatttggtggggaaagggtacaactcctgatttgctgtttcactttgaaacaacacaatttgttagatacttagggagatatactgttgaatttgcacaggatgtgactctgtttatacatattaacaaatttccttttggattccttagcagttcatcaaattagtattaaatttttaaatttaaaactagcatgaagggacatgaaatatttgcagtaggtggatctatgtaagatgtttgggtatggcattaatagcttgacaaagatttggggaaaggtgttaagaatgagtccatctcagccaatagtgcttggtgtataattcaagaacagagagttttccatcttgaaaaaacatggaaagtaatgctctatacccatatgtattaataagagcattttccttcttgccgttgatcatttcagatgataccacaatatgagtataattttttattaatcttttttctggtaaaattttagcaatattgtacaaatgctttttttaggttttactgtaaatattaatcaccacgtcacttcagagactagccttttattgctgaattaaatgacatgcatacattgataattatatatctgtattttattaaaaagtacttaaaattatattaaaatatgttattaaacccttttatgattttggagggtaatcattttaatgtctaaaaatattgatccaagaataagcacacacatgcacaccccaaacgcaaattctgtacctctcaaatacatggcagaaagaaatgggcctgctgttcatgtttcatgtgttaaatgtaatttcttggtgtgttgaccatgtcattgaaggtgaaggccctgacaaatgttgaacacatgaaaatttgaatgtgagaggaaagggatggggtggtatgttttgttttgggtccaggggagaaaggcaaggttacaagaatgagtggcttgcaccactgactagtgatgacagattacttctatgccccttgactagtaaacattccaagggacatcgcgatggggtgaggttgctgctatcaagaccagtcacattttgaaaattaacacttgcttccttacaagctgccttccagaggtcaacagcttttcacaagtgaggcacccagttgctgacccttgatttctggaatgtaaggggtcaggaatccttggtggcccccagagaaggttggggcacagtgtaacctatataaggaaggatcatactcactctttacatcaattagcaaaattttgaggaaaaagaatctcacttttaaaatgtaaatagctcttcattacccctccagacttaatcctaccagtaactcacaccttagtgtgaaattaataaacagcagctttggagatagctggaggtttgacttagaggaaaaagtaatttttgtagcaggacaattctgggaagatttgtatgggaaggagaaggtgcaagaagagagatccctaactaaactctgcagtgtcccatgaagtcctggtgcagagcattaaaaataatcatttcataaacttctttcaggaaccttggtagaggtggtggatgctacctaccctgatgctgtctctaattagagaggtttgtaaagattcctttgttgcaaagtgtaacacagtgttatttcctcatgagaaatttattggctcatctacatgaagttttttctaagctttcccttaagaactaattgtattaaattattaccatgttgtgttttaatctcattgttcatcctttctaaaaagaaatgctcagataagttgagagtaaggttaaatatatgagcagttaagtactcatacatgattacagcattctaagagttcaaaccttaaaaattatcagtgctagaaatcgacaaatatattcaagtatacaaacattcaacagatatataaacttagtatccctctacatgctgatatattttcaaataatgtgctttcttttcattgaactgtggtatgatgagaataacatgtcctcgggaattagagaacttagtttgagactatggatttctcaatcatgattttgggtaaaaaaattagctgctttatgtctcagttttgctatgtgtgaaaggaatggctgggatgataattgttagtattccttttagtttccaattcatatggtcctattatataaatatttagcttaatattgggaaactagttttataaaactattatatcttttggaatatattctgtttatttttggatatatatatatatatactgtatctgtggctttacaaagaatataacactatcagtattattttcaacttgttgaattatgtgaaatttatcctttaaatggaactgtgctttagttttacaggataaattttagtattttaatatcagaaggaagctatacttagtaacgtatttgctactttatagtgaatagtaaaagacattaataaaatttctttttcatgatgctcttaattgcatggcattaaattattttgttttgaaataagtatagcagtctattataatatatggagatcattccaagtccattcaaaatacatttaaatcctcgagaaaacaa

SEQ ID NO: 3976 - DNA, 12003 bp, Homo sapiens
tgcacgtcatccgtaaagactgtggagacgatctttctcccatcaagcctgttccatccggggagggagtaaaggcattctcctttccagaaactgtcttcacaaccgtcactgcctatcagaatcagcaggtattgttctcagaattggaatctttgtagatttttcatttcaggtgaagagagaaagttagctatccttctcactctaaatattatgaattataaagcatttgccatatatgacattcaaagtgtatatatatgaataacagttctttatccatgattttccaagtaagtctgctctaatgttgatttctttagacaaaccatgtcttgtgactgacagtgtaggtttactttccattttgagcttttgaattatatcttaattaaaattagaatgtatttttattgcctaaaaaatagacatgtagaatattaaaaatgaattgtatcatagagcatgggacttgatagcttactttatttttaaactacattctaaaaatagttcagaaacatttatcctgtatagtcattttggtacatatacaaaagggctatttctttcaagatatgctttaattgtgatagaggatgataaacttgcttatagtctgagagatcagcaatggtagaatacttatttcataaagttagaaatagtgtgagaagtgaaatatttcctttctatatgggtaaatgtatatatttctctaaggctatgtttatatgtgtcagttaggtagagaattgaatcagaggcaatatgtaatccatgctggaattccagctggttttcataagaaatatccatgtaatataagccgatgtggcctgtggtagatttttttttttttcaatttcagtggtcagcagaattgttctgggtctccatttctctttacatttatatacatttcaattacaaatttaaggcttttaaatctctctgttgtggtttctgttgttataaagcttcttagaagatttggatcctatcccatgtgttctttgggctgagaggctcaatagctcttatccgtatggagacatcagtatcacaaccgaagctgtcctgtcctctcacactcatgttgccactcttttataagcttttaggaaggaacatgaaatgtaatttttaaaagatccatagataatatatttattatctatgctaatagatataatataggaccatgctaataatataatttatttattatctatgctaatagatataatataggaccatgctaataataataggaccatgctaatcttctctgtattgtttcaattttagtatatgtgctgctgaagcaaacatatttaatatagcatatttaacgtattatatataacatatgtaatatgtgtaatatagtacataattataatgtatttataattttaatatatttaatataataaatatataagatatatacattatataaaatatatttataatgtatataattataaataaatgtatttatgattttaatatatcaaatatattaaaattataaatatcaatataaatatataaatagtataatatactgtacaataatatataatatacgaaatattatataatatataattataatatacttaatataattatatttagtatattatgagatataattatatatttaatgtattaaaatatattagggacagaaaacgattttttgggagaaaaagtaatacatgagaaaatagcagaggcatttagtattcttttaacaatctcaattcgtcacctctttctgtctctcttcctctctttttgtctctctctcacacacaaattaactgtgcactttgcatattttcttccaccctctgtggtacagtaagtgcaatgcagtcagcttttggtacatgttgtgactaacacaaattagtgaacattgagaagttgattaagatgatggacagattagaggagaaattgataatgataacatgcagtcacatttactttttagtttcctggctactatttttaagaacttaacggaacattgttagcagattagtggttaatagcatgagctctgcagcctgtggtcctggcttacttaagcttcagtttaaaataaaacacaaaactgagataatagctatacataagttgctctagtaattaaatgagtagtatgccgaaaacttagcacagtgtacattttatgcactcaatacatatgttagtaataaaaatgatgatagtagcaattgtgttatgtctctgttttaacaaggcaccattatataaatctgtactttttaaaaaacaacattttaaatgaacatttacattgcttaatgtttttaaacattattaaaatagacagaaaattgagctatattgatctgtaaagaagaattccttcaatgacagagtggcagacatgatgacttaattagcaaaccctttcattatatcatttataatatagttttatccacatactaagataacatcatatggaacacatatgtcttaagtgttgcgtggctgactggagggcgtgcacaagcaatgtagggggactgcagatgacttttatttaacagtttttgtccttagccaagatggtgtaattagaagtatgttcattaactttgtagagttcattaagcccaggaatttagaagccaaaacatgatgtgtctcttagaaaataggctgtaaattcctctgggcaaagtggagatctggtaataagcagatgggatggtatttattagtgtcaagttcaggatggcataactaaaaaaactattaatggagataattaaaccatttgtaaaaaatttcccccttaatcttggtgtcttagtgagcaaaaagttggttatgagtcaacaaattagaattcttgttaaaactaaaacatcatatataggaaccattttactacctatacatatttcatagtatgttgtgtacctccatataacacaatacaatttattttgaaagaaagttaaagtgaaagcatcatttatttttactccatttagtatgagatttgattcattagaaccttcaagtagtggttacctctggttagacattcactgtagtgctctgaccaggttaggactccacagataaaagaataaaactttcagataaaagccacaaagaatattaaaggagagacaaagaaaaatacagagacagaaaattaaaggaatgtgtacattattacctaattttaaagaagagaaagctctgtaggagcttaacaacatttaaatggctgttaaatagaagttggatacgagttattcctcattagctttattgagatagaaacaggattaaaccacatctcagagttaaagggaagaacttcagttcagagggaattgtcaattatagggcacgttaccaacagatgattcagaatctttttttccagaaatattaaaaaacaaaactaacttatatctattaatgcagattgaaaaggagtgaagtatcttttttagagcagatgaatgttctagatgatttctgaaattttccttagctttactgctaggatattaaaatacttggggaataaaagaggcttatacaatagagtcctctaacagttaacttttgactcattgtagttttgcaaccaagtaaaaacttgcttgacatttatataagatttgatatttttttttcctactctgcagattactcgcctgaagatagataggaatccatttgctaaaggcttccgagactccgggcgcaacaggtgggccttagtgaagaccattccggttatgataaatatatttgatattttattatgaattttctattacaaagtaaatggctaaatttactaatacgatattgaaatcatttctgatgaggactgttgtgcctcggagataacttatttttgtagtgtaatggtgtcacctaccctaaggtgaatgttcatgtgcgctgctgagctgaaaatcgaagctctcaggatgtacactgcatgctgtttctgaaggggccttgaagaaacctgcccttacaggcacagaggcttcagtatcctaattaaatatcctctctgcctctactattggtttagaatttctttagtgatgatgcgactatctattgatattgtctgtggagtacgatagggtctttcgttaagtcatatttccagctggaatatgaaactactctccattgccaagagagctgatgttctttagtttccaaatttgtcttggctctgctgacagccacatacttgtttattttttctgtttcacgttttgtggtgtttgtactaagtggtagagccacaataatgaattccactcttacttttatcaaaaagcagatcacctagtctatgtggcaaagggtttttgaatttattgatatgactctactccaatatagttcagtacaacattttctaaagtaactgttagtaagtagtaatagagagtaataatagactacagttctgcaaatgccttttcagagtaaggcttctgcttaaatgtttttaaaagcagcttgtttttaaaaagaagtatttgaacaatctttatgactttactcatgaaattattctaatactccttgaaaatccccaattattttagaggcagtttcatttgaaattttagagggaaaacaatccagattcttagttctttcagttgattaattgaacaagatgggtgacagagaccttttctcagaatacactcaagttcttgcagagatgtgatgtcattgttatatgcagtggcatcattgaaacaccacgcaacatgaggactgaaatgcagctaaaatgcactgagagtagagtagccttcaacttagtgcaggtagatcaggaagactaatagcagggcttccctctgaaatttttcactctgtaggaaagtttgcagatattcctaacacatgaaagttgtctgctgtattgaaattattttgttttttaaatgtgtgtttcaatgtagagaaaaaaattgcttgtcttttgttttgttacattagctcctggttaaccttgtttttcagaggtgtttctgaaaattaaaatgcaaattgaaccatcatttaataactggagatggccacttagtgaggtgactgaagagaacctttgggatgactcctattctaccttggcgaatgctttgatggaattattttgtgatttttgttatagcagaatagtatttgtccatttaagagtcttgtattactttcagtttttttttcttaaccagaaaaggaatttattaaaacactgaaattccgggagagaaatactcaggcttgaagaatatacaactagcaactatatccaagctatcaattactctagcaaagtcttcactgctactgactcaggggtcacatgcttgtatatagtccatttttgaagggataaatttaaaatatttgaaaaatactttgtattttgaacagataatagtgaagaaacctctacaagaagtgagatgacagatacatatgacaagttttcaggaagaattctagatactcagcataatgaaaatacatttggatacttaaatttggtcagtgaaaatgacagtggtgttgttgaatataaaatactaggactatattgtttgatatggcgagttcaaaatgctagctttgatatggatttttctatccctttggctatttcaggagtatgtaagcctgacatccatggtgcttgttactatttcttccctgactctaaaactttaaaaattttggaggaacatacagaagacagtgaattatgttttaatgcttttaagattttgttaaaatttaaaatttttattttgttccaagtgtttaaacaatattatagtacatgaaaagcacattgagcctatatatggctttcttgctagtgaaatacagtttcaacttttttccttgctgaaactctcttgcttattatagacaagctatttactaatacttctcactttggaatgctaaatatctataaatcattattcctctatttaaaaatctgattgtaacattttccgttgacaaatgcaaaagacacatttggagaagagataattcagtcacctgaattacataagtgagcatttctaacttgtgtattagtttcctttaaaaaagaccaagttatatgtaagacttggtggagggcacggttgtttggagagcatgggcatgaaggggcatgattttttaattatattagtagagaagtgaagctatgagaaaaagtttaacatatttctttattacccctggttctattgtgctgttgttagtggtttttaaaacaaattctatttttatttccccgaccctgtacatgaaatatacaaattgaccaggacaagaaataaacatagacttgtgattgtttaaactttatgaaacaatttgccttaattaaaaattatccttttctggctatttatggctgcacagcctattttacaggaatcagtagcttcggcccttaaaagctctcctgcaagacatttgctatgtgagagagaatttatgtgctgagaatagtttcattcttcagttaggccttaggtttgaccctataaaattttttactcaggaaggtacaaaaatttcttctctttaaatacttcaggaaaaacataaccattttactaaataaacttggccatttgatagcataaattagggcagtgataaaatgtggaaattgttcaaaggcatcttgtataaattatcgccttggctgcactcctgcaggaggtgccttttatcttttctttaactagccaggaaaggtctccattactggagaaaatgaaggctttttaaaaaatgtccagattcagctaataaacattttataactgtttcctgcaaaatatctaaaatcctttctggaacttgtagtgtgaaacagcagcctcaggaaaaatatcgattgctccaaatcagatcacttgtagatatgtcagcttcagagcatctctttaaagcttagggttatatatttgtgatgatcaataacttctccctaagaatttagtttatggatttgtgtttgaatcataataaagtttacactgctaaagcaaataatgcagtaagatacatctctgtagtcagtttctaagtccagtggttgcttgttaattatcttagtaaacttccctcaagactgctctataatcactttagtatttttaatatttaaaactacaattaaactcatctatgtggtaataagaagctgttttatattaagctgtgtcttaacattcttttgcatttaaaatcgttgtatttctggaaagtcacaaaatttagtattggtataaattgaatagagggtgatcagctaaacaggacccagagttcattagtccagtgttaaacatacccacaggcaacatgtggtttggaactgaccaggtctgccaaactgcccagaaatcaatacactagtacagaaaatactatcaagtggcatgaacttggatttggcttgtagtttggccacagatatgatgactggtttggaaaaaaaatctcttagaatgaaacaatgttaggattaataagggtttcagaccttttgtaatctcatcctttctttgtgagaaactgaagtccagggagattagcaaatttgcttaaggtcagacaatgagttttagtgagttgcagtgccagtgcagtctttctgaccccaatctagtatccttaccactaaataattctctctctgtggcacattgattacatctgaagccagattctgttctctctcagggtaggccaggtggagcaggtgcaggtcccctctgtgctctgctcttttctttggcaatcctgcactatcccctctggggctgcagacatctctttgaagtgccctcagagctgcacccccagagcctgtgacttaagagatgagtcaggcttatgtgcagcctcatgaggtgtgtttgtgcatgcaagcctgtgcatgtatacacaccacccctccacacatgcatagctacatcattctgtcactaagatggggtaggcgtattcctccagaatgagtacagaaatcaattaacagagactataccctgaacactctaaggaagtaaattctgtgtgtgaagccttggaacagatggacaagtagtgtaagatagttttattggcacaaatcacttacctctggtgtttagagagctttcaccatattgtgtatgtggtatgactctctggggtggattcctctagtcttagtttgcaggttatgacttggggcgcagggactccagaggtggtagcaccttgagtcaaactattaaaggagatgtctattattggatatcccaggaagcaagtattttctacagtggagctacaggtttcattaaaagtgtaatgttacctagatcaacaaattacttagggctgaggtggttgaaggaagagtgatgaggtctcaggtgtggctgtcttgagaatgatctagttgagtgaatggcctcattcccagaacccagaggacttagtcacttgatatacagaggggaagtctctgaatcattcatggtaggagatggttgatatatgtatttagagtagttgcccttgttttaaaatatacgtatgtcatgtaagtagtccatatgaaacttaccctgtctctttaagtatccattcattaagtgtatttcagggttttaaaataatttgtgatttaatagtaactctatatactagatagccctgtgaggtcaccttcctgctctcctcccacacactgcagggagaggccagtgctgtttcttcatggccctcctgttgctggtgggagcccagcctggctacactgggtgtagtagagattgtgctcctgagagagaagtcagtcttctttggaggagtgcttccctgagctggctgctgaggcaccaaatgatgggcagtaatgacccttagaaaagagctggttttctaggaatgtgcttttgtggcaatgccttcctcacttagagggagaagtaacaggacaaggagagtgggtgtgttccagatcacagcagagccttggactcacagcagccaggagggactctcttcatctcagctccttagcccaagggaacagcttttcacccttcaggtcagctgagttttcctgagaacattaacaggcatcttgggtgggtgatttcagttctctcctgctgctggtaacaggatgttagcccattgctgaagcatttcttcttgccagtggcaagatcctaactggacagtgtgggggtactgtcaatatcagtgttgttttgagatgcttgctgctggtgaaagatccaaatgctcctaactagacttcttttgtccacccctatcctgaccctttccatttagaatgggtttggaagccttggtggaatcatatgcattctggcgaccatcactacggactctgacctttgaagatatccctggaattcccaagcaaggtaactcacaaagtctcctgggtcatatatacagcccgttcctgcctagaaactcaggcactaaaagtgtacaagtcattatttatacttacaataatgacctcatcaccagcattgtcctacagattccatctgtcttctgcatggtatggggatggatcaggaaaaaacggctctcatggtcacagattaaatcttagatgtcttaggctgtttgtatatttcatgacctttacctcatccttaaatctcgtattaaaattagaggtgctctgatgccaggtcctgttcacaagaaattgttgatggtgcccccagtccaccctttcttcagatcttgtttgttttctttcttcagcagaattgcctctgggtagggttctcctgttgggttaacgatgaggaaggtcaggcacattcaggcagaccctcctgggctcatctctgaatatttctcagcagcccagggctgatttcttctcagagggaactgcatggaaagcgatgttgcttcctctctggtctgctccataggtaacactctcagctcacttctacattcaggctttttaccatcatcctgcccagattccagtgagaatttgctatgctgggtttcagataattattattggttggattgggcttttggattattttgagacactatataaaacaccatcaatacagcaatgaaggttttacaacctgtccagccctttggaattctcctctccccttaagttctgtcaagtttgcaaacatcagtctgccagcagatccagagggggcaccatcactgccattggttggacacagggttaactaccctctctaagtttcacaggactgttgatttgttggacctctgctcttgtattagcatgtgattcaacaacttgttttctaattggaaatgagatttttcaaccagataattccttgaaagctgagaccatctccttttcatctctgtagcattcctccaacccttgccttgtaacaagctgtgtctagctcatatttacaaaattgaaaggaaaggatgactgtggagtcattctttacatttcaacttcttttgtaggcaatgcaagttcctccaccttgctccaaggtactgggaatggcgttcctgccactcaccctcaccttttgtctggctcctcttgctcctctcctgccttccatctggggcccaacaccagccagctgtgtagtctggcccctgctgactattctgcctgtgcccgctcaggcctcaccctcaaccgatacagcacatctttggcagagacctacaacaggctcaccaaccaggctggtgagacctttgccccgcccaggactccctcctatgtgggcgtgagcagcagcacctccgtgaacatgtccatgggtggcactgatggggacaccttcagctgcccacagaccagcttatccatgcagatttcgggaatgtccccccagctccagtatatcatgccatcaccctccagcaatgccttcgccactaaccagacccatcagggttcctataatacttttagattacacagcccctgtgcactatatggatataacttctccacatcccccaaactggctgccagtcctgagaaaattgtttcttcccaaggaagtttcttggggtcctcaccgagtgggaccatgacggatcggcagatgttgccccctgtggaaggagtgcacctgcttagcagtgggggtcagcagagtttctttgactctaggaccctaggaagcttaactctgtcatcatctcaagtatctgcacatatggtctgatgaagcctttaagttaaatgacatttggatctgtctaacatattttctttttcttttttaaaagctatgtggaaagaaactctctgtggtttataaaatgtacatataatagaaaatgaaggctcactgggttttttgactttatcatggtgagattgtaattatctatggtatatatgtatgctgtatatacatagcacatggagtatcacggcccctattgttcccctgtttcatccagttgcacggagtattggcatgcgtgtagtatgtttaagcaaagttctcagactcttttaaaaacaagatggtaaacttaaaacttggcaattatactatccagaagaacacttataacttaatttatcagaaaaatgctctaaacggtttcatacttgatgtattgataaccagcagtaaccagcatgtagagtcttgtgatttctgttattcttggacacagtgtgagaatctaaaatacaaaagccagttgaagtcttagtgttagtcctgaggtatttgtaatcatgaaggatcagctttttcattcctgcttattatttaccacacatactatatgaccttgggtctataaaaaaatcataacccataataattgttattttcttaaggaagg

SEQ ID NO: 3977 - DNA, 1468 bp, Homo sapiens
gatgaagtgctttctgggggcagagcactttcatgtatcatcttactgagtcactacaatcctcactctgtgaggtgatgatatattagccccattacacagaggagaagggctcagaaaagttcttagctcacctgaagtcacacagctaaaagtggcaaagatgggctttggatttttaatccaagtcagtcttgacagaaaagcccatggcctgtataccatatacaacaagttgcctctcttacaattctccttcctcaggctgggtgcgctggctcacacctgtaatcccagcactttgggaggctgaggcaggcagattacctgaggtcaggagtttgagagcagcctggccaacatggtgaaactccgtctctactaaaaatacaaaaattcgccaggcgtggtggtgggcgcctgtagtcccagctacttgggaagctgaggcaggagaattactggaacccgggaggcggaggctgcacagtgagccaagattgcaccactgcactccaggctgggcaacagagtgtgactccgtctcaaaaaaacaaaaacaaaaacaacttctccctcctccacagactcctccctggtcaccactagtgatccaccttatggatctcccaaggccacctctgcctctgctctgtgttgtattatttggggacctgtggtctggcatgcattgtacttggtgccccaaagggctgtggcatctgataagtgatttatcctcaggcacagatttgcactatgtcaccactacttgtatgtagaagtgagtcaccggctggcaaatgggcatagctgctgggcagtggatgcagctccatgcatgttattctcatttgatacaggatctcattggcttctcacagcaatcctgtgcactataggtattgctcccgggaacagatgaggaaacaggagagtgcgagattacagtaattttgtaaatgggaggatttgtgaaggtttcagacatacaccctctctcatatgtcaaggatatgaagtctaatgaatcccctaaagcagcaggggttggcaagctgtggccctggggccaaatcagcctactgcctgtttttgtaaataaagttttattggaacacagtcacacccatcatcaatgtattatctagggctgctttctgttcattggtagtttgttgagtagccacagcagagacaggcttgcaaagtgaaaatactatctggccctttacagaaaaaaagggtcagtgtccctgctctaaagaagtatgtgtgaggtgccctggccacttatgggaagaaaagctgagcctattcagcaaggttttaggtggctcagattttatagaggaacaaacattgagctggcctgggaaggatgagcagaaggtcgtcgagtgtgttgggggctgggggactctacgcagtgggagctccttacatacaggcatgagaaagcctggtg

SEQ ID NO: 3978 - DNA, 15071 bp, Homo sapiens
tgagaaatgatctcctgaatattattcgagaaaagaacttggcccatcctgttatccagaacttttcatatgagaccttccagcagaagatgctgcgcttcctggagagccacctggatgacgccgagccctacctcctcacggtgcgccttggcccttctcccataaccatggtgtgcccttgaggatgtgcggggaatcagaatatctgaagtgaaaagagttgatgtgtgaaaaagacattgaattgtatgcactagctttcttaattaaatgccttaaaaatgcaaaagcaggccaggcgcaatggctcacgcctgtaatcccagcactttgggaggcccaggggggtggatcacctgaggtcaggagttcgagacctgcctgagcaacatggtgaaaccccatctctactaaaaatataaaaattagctgggcgtggtggcaggcacctgtaatcctagctactttggaggctgaggcaggagaatcgcttgaacccaggagatggagattgcagtgagccaagattgcgccattgcactccagcctggacaacagagcaagactccgtctcaaaaaataaataaataaataatacaaaagcagagatactggcagaggcaaatggaacacacctggtctccctcatctgccatttttatctcctttacacatggttaatctgccatggttgaagtagaacattcacttgcaatcgatggtggttcccaaaggcgatgacttgtgaactaagtttggaggaagggtggtttggtagatgtggtacgatggagttgctaacaggaagaaggcatggtgtggagaaaggtgtcactgaaagtataaagttgaaagaagccaaatgaaaacattctttaattggatcaaagagataaaagaatggaagcagtgaggctcaggacagcatagggaagaactagacccaggctgtcatagatgggagactgtggtgaaggaacactgagtgagagtggttttgttttgtttttgaaaccaggactttggcccagtacagtggttcacacctgtaatcccagcactttgggaggccaaggcaggcaggttgcttgagcttaggagttcaagaccaccctgggcaacatggtgaaaccccttctctacagaaaatacaaaaattagccaggtgtggtggcgcgtgcctgtagtcccagctacttgggaggctgaagtgggaagatcacttgaggctgccagtgagctgtggttgtgccactgcacttcagcctgggcaaaagaaaccaggactttgagaatgtggaaaatattctgtctcgtaacagatctgccaggcccatattaggatagtgtccatgatcttagcagtcgtttggcaaatctcagattatttataagcaggtagtttgggatattcaggcagcaggtgtcaagatagttgagcctggcctagggtcctttcctttccattccaggtaactggaaactatccttatctatataacacaaagagccctgattagcctactcagggctctttgtgttatatagataaggattctcaaacagttgttaataaggcaaaacatttgtagaaacagttataaaaattctatacacaaactggaagatattagtatgaacatttattgccgggcatggtggctcatgcctgtaatcccagcactatgggaggctgatgcgggcagatcacttgaggtcaggagttcgaggccagcctggccaacatggtgaaaccccgtctctactaaaatacaaaaattaactggacatggtggtgggcgcctgtaatcccagctacttgggaggccgagatgggagaattgcttgaacccaggaggtggagattgcagtgagccgagattgcaccactgtgctgcagcctgggcgacagagcaagactccctctcaaaaaaaatgtattagttatcttaagtttgaataaaaaaagcttgatttataagtcttacaagttctctcccattttatgtccttcgttttatgcctagattggatttgtaagtgaacttgtttgcatattgagtatattcttggtgaaagaagcagagaattaatgcaattctgtggcctcttcttcctgatgacatccttcctttcccagatggccaaaaaggctttgaaatctgagtccgctgcctcaagtacagggaaggaagataaacagccagcaccagggcctgtggaaaagccacccagagaacccgcaaggtaaaaagatgctctcttgtgatcttgggtaaaacactagggtggtcgctggaagcagtctcctccttaggccaggatcagttcctctcagcactccgacctactaacgtgttacgaggttactcatacaaggcactgggggagactgcacaccctgggaagataaggaaacaggatgcctggggtccctgacaacttcctgactggccattcctcaaaggctctttcaccatttctctctccttgcctcccccgtattgactcagtacttttcttgtggacacctaatctcttaatacattcaggaagcactgctcagatctgtgagtcgaatcccaaaaccagttcctaaagcaggggtcacaagcttagatgccctttgagggccggttaggaaacctaaaggaacaaagtggacctaggctgagagcatggggctgggaaccaggggatgtgcttttcagcttcttgtggttgttgctctgtgggagtatccaaggatgctcaggcttcaggtgctcagatttttgtatgagatgtccagggttttccatgagatttcccagtttttggatgttaacagttgatccacttaaaaaattttttttcatgttggttagacaacaagacaggctgccagatggatttggcctgcaggctgccagtttgccccctctcctaacagtttttccctaaagcatactaactgttccaaatgatagatgaactttatttttaaaaggcagtttctcattgttccaagactgtgtggcatgccttttactctgagaattctcaagatcctgctcttaagtgtgttgtaggccgggtgtggtggatcacgcctgtaatcccagcactttgggaggccgaggtgggtggatcgcttgagcccaggagttctaggatacagtgagctgtgtttgtgccactgtatcctatctctctgtcctatctactgtctaggacagacccagaccctatctctaaaaataaaatgagaagtaaaataaaggttctctaacttggagttttaaattcataatacaacttacatatcacatttaaagcctcctcaactggaatttgaagcttcaaacttcaaaaaagttgtggctgtttggatgagcatcatcagtggtgaaaaacatctttgtgcctatgcttgatttgcaggcagctacggaatcctccaaccaccattggaatgatgactctgaaagcagctttcaagactctgtctggtgcacaggattctgaggcagcctttgcaaaactggaccagaaggatctggttcttcctactcaagctctcccagcatcaccagccctcaaaaacaagagacccagaaaagatgaaaacgaaagttcagccccggctgacggtgagggtggctcggaactgcagcccaagaacaagcgcatgacaataagcagattggtcttggaggaggacagccagagtactgagcccagcgcaggcctcaactcctcccaggaggccgcttcagcgccaccatccaagcccaccgttctcaaccaacccctccctggagagaagaatcccaagtatgaagaccttctttgtagaaattttggggctggttggtggtcctggttgggcctggtattacttccgtgaatgaagtaactttcagctaagttactcaccaccaaggcttgctcagactgctagaacttgacgcaggagtggccagtgacgacgtagccatccctgccggttctgaagccccgcatgtgggcttccaagccttgcactagggcatgagtgggaatggaaaggtttcagagcctcctactcatcgctgctttcatttttagcaaacatctgagtgtcttgacttctaaacattagtcttgtgtgttaaaagaaatttgtttgcattgggccacattatactttgacccttaaaaagagactgatgaatatgtataattttgcacccttctgagcatttgagacttggcaagttcagtgaatacttactaatctcccatgtcctgctaggtactgtggggcagtggctagaatactttaattttgctccccattgtgattctcatcctggctttgagttttgcttccctttgtgtcctgtggtggatcctccctccaggcagactggcctgcttgctctctggaacatgttgtttgtttctaccactgtacttttgcttcctctcattccccacagtggaccgtcatcccttcatcattgcttgtccaaatcccatttgtcctttaaagggaagaaaagccgttgttgatgaagtgctttctgggggcagagcactttcatgtatcatcttactgagtcactacaatcctcactctgtgaggtgatgatatattagccccattacacagaggagaagggctcagaaaagttcttagctcacctgaagtcacacagctaaaagtggcaaagatgggctttggatttttaatccaagtcagtcttgacagaaaagcccatggcctgtataccatatacaacaagttgcctctcttacaattctccttcctcaggctgggtgcgctggctcacacctgtaatcccagcactttgggaggctgaggcaggcagattacctgaggtcaggagtttgagagcagcctggccaacatggtgaaactccgtctctactaaaaatacaaaaattcgccaggcgtggtggtgggcgcctgtagtcccagctacttgggaagctgaggcaggagaattactggaacccgggaggcggaggctgcacagtgagccaagattgcaccactgcactccaggctgggcaacagagtgtgactccgtctcaaaaaaacaaaaacaaaaacaacttctccctcctccacagactcctccctggtcaccactagtgatccaccttatggatctcccaaggccacctctgcctctgctctgtgttgtattatttggggacctgtggtctggcatgcattgtacttggtgccccaaagggctgtggcatctgataagtgatttatcctcaggcacagatttgcactatgtcaccactacttgtatgtagaagtgagtcaccggctggcaaatgggcatagctgctgggcagtggatgcagctccatgcatgttattctcatttgatacaggatctcattggcttctcacagcaatcctgtgcactataggtattgctcccgggaacagatgaggaaacaggagagtgcgagattacagtaattttgtaaatgggaggatttgtgaaggtttcagacatacaccctctctcatatgtcaaggatatgaagtctaatgaatcccctaaagcagcaggggttggcaagctgtggccctggggccaaatcagcctactgcctgtttttgtaaataaagttttattggaacacagtcacacccatcatcaatgtattatctagggctgctttctgttcattggtagtttgttgagtagccacagcagagacaggcttgcaaagtgaaaatactatctggccctttacagaaaaaaagggtcagtgtccctgctctaaagaagtatgtgtgaggtgccctggccacttatgggaagaaaagctgagcctattcagcaaggttttaggtggctcagattttatagaggaacaaacattgagctggcctgggaaggatgagcagaaggtcgtcgagtgtgttgggggctgggggactctacgcagtgggagctccttacatacaggcatgagaaagcctggtgtgcccctcagagtgtcatggagcctatggtaggagaatacggtgcataggaaagagtgaaggtaggagagtctgcatgctagatgggccaggcctgggatttctgtagtctagtgtgtcaggcagaggctctcaagctgggcttcatgacacaatgacctgtggaatgctcaaaaaatacatattcccaggctcctggctactgaattagaagagtcaggagaatgccctttaatctgctttttaaaccatgccccagataattctaatacaacaaattggaaggcctgatgagaccccactcagggaagggagggagggaggctggagactggagaccgctgccagggagcagggaggggcagtgggatcaggagggaaggcagggttggcagtgtcacttggacagggccaccatgccccaatcttgtatctcccacggcaccttgcacatagcatgtgtttactaggtatttattcaccaagtaaaataaggattctttgttcttgcatgttaaggagtgacacccaaaacacctgtaaaaagccagcagagggtaacattttaggcattttgggccacatgagttgtctgtctgttccatattcttttcttgttttttctttttctttttttcttgagacagggtctcgctctgtcacctgggctggagtacagtggcacaatctcggctcactgcaacctctgcctcccaggttcaagcgattctcctacctcagccaccatccccgcccccatcccagtaactgggaccacaggtgcgtgccaccgcacctggctaatttttgtatattttgtacagatggggtttgaccatgtaggctggtctcgaactcctggacttaataagcgatccacctgcctgggcctctcaaactgctgggattacagacgtgagccactgctcccaactgtctttttttgtttttttgttacaacccttaaaaaacgggcttgccattctcaccccaagcttcatggtacacaagccgcagcagccagactgtagcttgccaacacttgctagaccattgctcttcatgttcaaactgccagtcaggagcacaaggaccaggaagtggcctgacttggccaggaccactcagcccattacagttaggaggagcggccagatctcagccccatccacttgggaagtcaggagaggcagtgaacacatcacctgaaagtcagaggtcttgcgaaatcaccaccaaagcatgtatttgtacaggtaatagtgctgagagttcaacagaggacagggagaaggtgacctgtgaagactgtgcagggagggaggacagccactcagggaacatgacggaccagctggggactgaggttccaactggttttattccagcactgggataagcacatagaaaacaaactataaccccatctgatttttatttatgaatagtcattaacacaagaatatcctgagaaggaaaaacctcctgtaaaatgttttcactttgtctcaagtaaattattctcaagtaacatttggggataagatccaatgtaaaaacaagagaaagttaggtctaccatttgtctcagccacttagttaagtaatttcatagaaaacttatggaactcaaggaattttttcaagcctatgtacttattcatcaacttgcttttattattcatttgcaaaatacccaaacagcattaaaaataagttttttcttcatggcgggtgaagaatacagaaatttgtctctattcttggttaacttttgcgggtcatttgatttatataaattcctcaagactctgaattcagacactttccatgtttgtaaaagatgttataattctgaggtcagatctgtgctttgctctgttcccagggcagttattaatcaggtaaatgcaaagttgattagaagaaatgggctatagttttcattgaataatttgagtttggggttattttcagcttttgtactttttttagccacacccaagcatttaacgtttcatgttcacaagaaggattcttgtttgctttttactctaatctttgatggtataactcccttgtggctctctgacaatcacaatgttagttcagctaatatgtctccagctcacattggggtctgtgttactgtgctgggtatgctatgtgtttgggatggacaaaggaagatgtggcccccgccttcgaggcggtcctggttaggggcacactgcaaagtggcacttggtatggtggaaacagcactgcaggcaggaggagaaaggctttctgtgtgtgttgtggttggtagttagaggaggcttcactgagaaccatggccttgaaagatggatgagatgtcacttagcagggaagggactcccaagcagaggggctacagagaggcaggaaagtacagagcttatggaaggaagaaagagcagaacagtgtggctgtgctgtttgcacaggtgtgggcatcgtggggcggttggttagaaactgacgggccagactggatggtgtggactcccccatacaggcatatagatgccactgttcaggcagagagaagccattagggaatagaagaggcatgtggtaattttagggtgattgtcctaaaatcatctttggctttggaaggggaagagcctagcggcagagactctagttaagaggctagtggaatactgatgaaaggcgccgtgagcttgaacaagggggaatggaaacggaaaaatcagtccagatataggaagaaggcatgtccaaggaagagagggaggggtttgcaggttctaaatcagaaaaatactgagacctttaaaagagtcaaaaccaaacaagcaaaacaggaaaatgaacagattctttagaggggtggtgatgtgcttgatgtactcagtgctgaatttgaagggtgtcctgcagcctgaggggtgttacgtggagatgcctggccagccaggagaaaggacagtggctttgggaggtgcatgcaggcgaacctcgattgtggtcacaacgggacaggaaggagtacagggccaagagtgagccaagaccagaatctgggacaatccagggtgaatttgttttatacctgtgctctccttgatctcccctcagagtacccaaaggcaagtggaacagctctaatggggttgaagaaaaggagacttgggtggaagaggatgaactgtttcaagttcagggtaagcagaagattctccttggcctcttcttgatgcttgctgaagtacagatgcgtgttactgtcatgttaatattccagaagctgcttgtctccgaactagaaaaagttcagtaagttcccgatctcattttaattcatgaagaatcagtttttttttttttttcctttttcagacagggtcttgctctgtcacccaggccagaatgcagtggtgtaaacatggctcactgagcttcaaccttctgggctcaagtgatcctcctgcctcagcctcctgagtagctgggactgcaggtgtgcaccaccacacctggctgtttttttcactttttgtagagatggggtctcactttgttgctcaggctggtctcaaactcttgggctcaagcgatcctcccacctcagcctcccagagtgctgggattacagatgtgagtcactgtgccctggtcaaggagtcagtctgatgtcctctcccattaaataatggagactgtcagagtaacgccttatgtttaaagagagttcttggttttgttttaataacgcctatgatatttaattatagttgatgttcttcctaaaatccttcaattagatgtggtagtagggggtcattccctgcatttcttgtttaaagaaaaaaaaatcttaacagtttctatatataaatcctttttttttttttttttttttgagacagggtctcactctcatccaaggtggaatgcagtggtgtgatcttggctcactgtagccgtgacatcctgggctaaagcaattctcccaccttagcctctggagtatcggggactacaggcccttgccaccatgcccaactaatctttttttgtatttttagtagagccagggtttcaccatgttggccagtatgatctcgaactcctgggctcaagcaatctgtctgcctcatcctctcaaagtgctgggactatacttgtgagccaccataccataccctaccaaaattgttttctttttttcttttttttttttgagatgcagtcttactttgttgcccaggctggagtgcaatggtgcgatctcggctcactgcaacctccgccttccaggttcaagtgattcttatgactcagcctccttagtagctgggattgcaggtgtgtcgcaccacgcccggctaatttttgtatttttagtagtcgggttttcaccatgttgggcaggctgctctcaaactcctgacctcaagtgatctgctcgcctcagcctcccaaagtgttgggattacaggtgtgagccaccgcccagacccaaattgtacttctataaaatgaacaaggacttgaaaattctaggctgggcgtagtggctcatgcctgtaatcccagcactttgggaggccgaggcaggcggattccttgaactcaggggttggagaccagcttgggcaagagggcaaaactccatgtctacaaaaaatacaaacaaaaaaaatttaggccaggagtggtggctcacgcctgtaatcccagcacttttgaaggccgaggcaggcggatcacaaggtcagaagttcgacaccagcatggccaatatggtgaaaccctgtctctactaaaaatacagaaattagccgggtgtggtggcaggcgcctgtagtcccagctactcaggaggctgaggcaggagaatagcttgaacccgggaggcggaggttgcagtgagctgagattgcaccactgcactccagcctgggcaaaaaaaaagaaaaataaataaatacaaaaaaaaaaatggggaatgatagtaagaggaagattaaaaaatgaaggagaaaaaaagaaaattttagtacaaaacagcaaaaccatatgatttctttttttttttttttgagacagagtctcgctctgttgcccaggctgggggtgcagtggcgcgatcttgcctcaccgcaacctccacctcctgggttcaagtgattctcctgcctcaacctcccgagtagttgggactataggtatgtgccaccactcccagctaattttcatatttttagtagagaaggagttttgccatgttgtccagactagtctcgaactcctgacctcaagtgatccgcccgccttggcctcccaaagtgctgggattacaggcgtgagccaccacacccagccaaaaccatgtgatttcaaagcagtggttagcaaggggttataatgcagaaattatacatataaacacacctatagtcatgtgccacataacaaagttttggttaacgatggactgcatatatggtgacggtggtcccattaggttatatatagagctgaaaaattcatatcgcctagtgacattgtagatgtcataggcattgtaacattgtagtgcaatgcattactttgtctctgtttagatatgtttagatacacaatatttaccattgtgtcacagttgcatgtcacatgctgtacaggtttgtagcggaaaaataggctacaccatatatcgtaggcatattccttttttgcagaggttagctaagttaatagtaatcggtaagattaaggggattaggactgttatagcagtggaagaatacatgtttgttacttttatttggagttgcaccaatgtttttggttcctaagtccagtggatgactctagtcctttaaaagttgagaaagccatgttgttagacatggggacatgagttagcagttgtcagatactttctccatagataagaagttgcaggctagagcctaggctctaccatctaggtttgtgtaagtcacacaaggatgaaatcaccaaacgatgcatttctcagaacatatccccattgttaagcaacatatgactgtatatatacatacacacactaatacctatatgtatatgtagacattatatatacataagggttttaaatatgacgttccctcagtaattttagaaaacgatgttggggccaggcatggtggttcacacctggaatcccagcactttgggaggccgaggtgggtggatcactaggtcaggagattgataccaccctggctaacacagtgaaaccctatctctactaaaaatacaaaaattagccgggcacggtggctcatgcctgtaatcccagcactttggaaggccgagatgggcggatcatgaggtcgggagatggagaccatcctggttaacacagtgaaacccggtctgtactaaaaatacaaaaaaattagccgggcgtagtggtgggcgcctgtagtcccagctactcgggaggctgaggcaggagaatggtgtgagcctgggaggcggagcttgcagtgagccgagatcgctccactgcactccagcctgggcgacagagtgagactccttctcaaacaaacaaacaaacaaaaattagccgggcgtggtggcgggcgcctgtagtcactcgggaggctgaggcaggagaatggggtgaacctgggaggcggagcttgcagtgagccgagatagcgccactgcactccagcctggggaacggagcaagactccgtctcaaaaaaaaaaaaaaaaaaaagaaaacgatgttgattttactgaagagcttgaaacgcatcactagccagcatttacggatgcctgtttgtaaagcacttgcattgtacaggttctcataggctgaagtgactggtgtttgcaaataaaggagaaaagtaaattatcctttagtgatatcctttctcttctcaatgcttgtgaaatttgaagaagttttccctttggggacattccatgtctttttcttgtggtttgtgcagagaaaggtgaactctgaaatgagtctacttttaatgttttccagcagcaccagatgaagacagtacaaccaatataacaaaaaagcaggtaatttaaaattctcttttctgttactggttatgtgggtagagcagaggtaaaatacgcgccctgtctcacaggtatagactggttatgtacccagtaaaaacctttttttgagattttcagataatccaaactaagttaaagtaataattatcttctggaagaaaagactaggaaaacagatgacacattttccggaacatgaatgatgtagatatgtttgcagtttggaatgcagaagtgattgttacttgaggatcaaatggcaggacatcaagaattcctgtgtccagatccacagtgctcatatcttgtccattccatgtttaaaaacataagctgtgatttcaggttcagatgattctcctgggattcttgagtttaccttatcactacattggagaaaatgtaagtaagtggagaggaaaggtggtaataaatcttttggttttcttttgcagaagtggactgtagaagaaagcgagtgggtcaaggctggagtgcagaaatatggggaaggaaactgggctgccatttctaaaaattacccatttgttaaccgaacagctgtgatgattaaggatcgctggcggaccatgaaaagacttggcatgaactgaaacaggctttcatttccacagaattcacaggagcatggttcctaataatagcccctgatagtctgctctttctttctttttcttttttttttttttttgagacagagtctcgctctgtcacccaggctggagtgcagtggcgtgatctcggctcactgcgacctccgtctcccgggctcacgccattctcctgcctcagcctcccgagtagctgggactacaggcgcccgccatcacgcccggctaatgttttgtatttttagtagagacggggtttcaccgtgttagccaggatggtctcgatctcctgacctcgtgatccacccaactcggcctccccaagtgctgggattacaggcatgagccaccgcgcctggcatctgctgtttctttcagaagctgggctgggatgagaattttgggcaacctccttcgacgtgggggaggtcccatttccacttcatcactgttggagatcatggagctaagaagcagagccaagtccacccatgtccttggcagagatgacaggcacacagcttgtgcagtgccagaatatcattagcgtttcccttctttagtggtttgcttaaatttaaatccctggtaatctgtagaaccttctcctaggaaatggtgaagtctattaggagccacttgtgactccatgacctgttaaaaccagcaatgtgagtattatttggagtaaatttgttccacgtcaagttctggccttctgatgcaaatgcaaaggaacttagtctgttatgaacccaggttgatgacagaccagtccttgtggaataagattccctttaaaaactctttagccagtcgtgacatcaaccctagacctgtctgccttggcatttgctgtcaacatctgctgggctatgtaggcaggttaatcctccacttctcatgtggttgaaccagtgtgttttttggtaaaatggtgattgtagataagattagttccctgatcccctgccccctgtcccctgcctcttttcccaattcccttccttatgctggacttttaaagcttaaaaaaaatccgattgaatataaatgcctaatttcattctttgtgaaatggttgcttcctcctgattccctaattgtgctgtgttcgtgtcttgcactggaattcaacattcccttctccttttgtactgtgttgtgcttgctgtctctcccggacacccttaaagactgtctttttagcaaaaaatttcagtaaagtgttttctgtaatctttttttaaaaggtgagaactaattattgtccatacttgtagcattcttcattaaagtcttgcttctctcaactgtaa

SEQ ID NO: 3979 - DNA, 15070 bp, Homo sapiens
tgagaaatgatctcctgaatattattcgagaaaagaacttggcccatcctgttatccagaacttttcatatgagaccttccagcagaagatgctgcgcttcctggagagccacctggatgacgccgagccctacctcctcacggtgcgccttggcccttctcccataaccatggtgtgcccttgaggatgtgcggggaatcagaatatctgaagtgaaaagagttgatgtgtgaaaaagacattgaattgtatgcactagctttcttaattaaatgccttaaaaatgcaaaagcaggccaggcgcaatggctcacgcctgtaatcccagcactttgggaggcccaggggggtggatcacctgaggtcaggagttcgagacctgcctgagcaacatggtgaaaccccatctctactaaaaatataaaaattagctgggcgtggtggcaggcacctgtaatcctagctactttggaggctgaggcaggagaatcgcttgaacccaggagatggagattgcagtgagccaagattgcgccattgcactccagcctggacaacagagcaagactccgtctcaaaaaataaataaataaataatacaaaagcagagatactggcagaggcaaatggaacacacctggtctccctcatctgccatttttatctcctttacacatggttaatctgccatggttgaagtagaacattcacttgcaatcgatggtggttcccaaaggcgatgacttgtgaactaagtttggaggaagggtggtttggtagatgtggtacgatggagttgctaacaggaagaaggcatggtgtggagaaaggtgtcactgaaagtataaagttgaaagaagccaaatgaaaacattctttaattggatcaaagagataaaagaatggaagcagtgaggctcaggacagcatagggaagaactagacccaggctgtcatagatgggagactgtggtgaaggaacactgagtgagagtggttttgttttgtttttgaaaccaggactttggcccagtacagtggttcacacctgtaatcccagcactttgggaggccaaggcaggcaggttgcttgagcttaggagttcaagaccaccctgggcaacatggtgaaaccccttctctacagaaaatacaaaaattagccaggtgtggtggcgcgtgcctgtagtcccagctacttgggaggctgaagtgggaagatcacttgaggctgccagtgagctgtggttgtgccactgcacttcagcctgggcaaaagaaaccaggactttgagaatgtggaaaatattctgtctcgtaacagatctgccaggcccatattaggatagtgtccatgatcttagcagtcgtttggcaaatctcagattatttataagcaggtagtttgggatattcaggcagcaggtgtcaagatagttgagcctggcctagggtcctttcctttccattccaggtaactggaaactatccttatctatataacacaaagagccctgattagcctactcagggctctttgtgttatatagataaggattctcaaacagttgttaataaggcaaaacatttgtagaaacagttataaaaattctatacacaaactggaagatattagtatgaacatttattgccgggcatggtggctcatgcctgtaatcccagcactatgggaggctgatgcgggcagatcacttgaggtcaggagttcgaggccagcctggccaacatggtgaaaccccgtctctactaaaatacaaaaattaactggacatggtggtgggcgcctgtaatcccagctacttgggaggccgagatgggagaattgcttgaacccaggaggtggagattgcagtgagccgagattgcaccactgtgctgcagcctgggcgacagagcaagactccctctcaaaaaaaatgtattagttatcttaagtttgaataaaaaaagcttgatttataagtcttacaagttctctcccattttatgtccttcgttttatgcctagattggatttgtaagtgaacttgtttgcatattgagtatattcttggtgaaagaagcagagaattaatgcaattctgtggcctcttcttcctgatgacatccttcctttcccagatggccaaaaaggctttgaaatctgagtccgctgcctcaagtacagggaaggaagataaacagccagcaccagggcctgtggaaaagccacccagagaacccgcaaggtaaaaagatgctctcttgtgatcttgggtaaaacactagggtggtcgctggaagcagtctcctccttaggccaggatcagttcctctcagcactccgacctactaacgtgttacgaggttactcatacaaggcactgggggagactgcacaccctgggaagataaggaaacaggatgcctggggtccctgacaacttcctgactggccattcctcaaaggctctttcaccatttctctctccttgcctcccccgtattgactcagtacttttcttgtggacacctaatctcttaatacattcaggaagcactgctcagatctgtgagtcgaatcccaaaaccagttcctaaagcaggggtcacaagcttagatgccctttgagggccggttaggaaacctaaaggaacaaagtggacctaggctgagagcatggggctgggaaccaggggatgtgcttttcagcttcttgtggttgttgctctgtgggagtatccaaggatgctcaggcttcaggtgctcagatttttgtatgagatgtccagggttttccatgagatttcccagtttttggatgttaacagttgatccacttaaaaaattttttttcatgttggttagacaacaagacaggctgccagatggatttggcctgcaggctgccagtttgccccctctcctaacagtttttccctaaagcatactaactgttccaaatgatagatgaactttatttttaaaaggcagtttctcattgttccaagactgtgtggcatgccttttactctgagaattctcaagatcctgctcttaagtgtgttgtaggccgggtgtggtggatcacgcctgtaatcccagcactttgggaggccgaggtgggtggatcgcttgagcccaggagttctaggatacagtgagctgtgtttgtgccactgtatcctatctctctgtcctatctactgtctaggacagacccagaccctatctctaaaaataaaatgagaagtaaaataaaggttctctaacttggagttttaaattcataatacaacttacatatcacatttaaagcctcctcaactggaatttgaagcttcaaacttcaaaaaagttgtggctgtttggatgagcatcatcagtggtgaaaaacatctttgtgcctatgcttgatttgcaggcagctacggaatcctccaaccaccattggaatgatgactctgaaagcagctttcaagactctgtctggtgcacaggattctgaggcagcctttgcaaaactggaccagaaggatctggttcttcctactcaagctctcccagcatcaccagccctcaaaaacaagagacccagaaaagatgaaaacgaaagttcagccccggctgacggtgagggtggctcggaactgcagcccaagaacaagcgcatgacaataagcagattggtcttggaggaggacagccagagtactgagcccagcgcaggcctcaactcctcccaggaggccgcttcagcgccaccatccaagcccaccgttctcaaccaacccctccctggagagaagaatcccaagtatgaagaccttctttgtagaaattttggggctggttggtggtcctggttgggcctggtattacttccgtgaatgaagtaactttcagctaagttactcaccaccaaggcttgctcagactgctagaacttgacgcaggagtggccagtgacgacgtagccatccctgccggttctgaagccccgcatgtgggcttccaagccttgcactagggcatgagtgggaatggaaaggtttcagagcctcctactcatcgctgctttcatttttagcaaacatctgagtgtcttgacttctaaacattagtcttgtgtgttaaaagaaatttgtttgcattgggccacattatactttgacccttaaaaagagactgatgaatatgtataattttgcacccttctgagcatttgagacttggcaagttcagtgaatacttactaatctcccatgtcctgctaggtactgtggggcagtggctagaatactttaattttgctccccattgtgattctcatcctggctttgagttttgcttccctttgtgtcctgtggtggatcctccctccaggcagactggcctgcttgctctctggaacatgttgtttgtttctaccactgtacttttgcttcctctcattccccacagtggaccgtcatcccttcatcattgcttgtccaaatcccatttgtcctttaaagggaagaaaagccgttgttgatgaagtgctttctgggggcagagcactttcatgtatcatcttactgagtcactacaatcctcactctgtgaggtgatgatatattagccccattacacagaggagaagggctcagaaaagttcttagctcacctgaagtcacacagctaaaagtggcaaagatgggctttggatttttaatccaagtcagtcttgacagaaaagcccatggcctgtataccatatacaacaagttgcctctcttacaattctccttcctcaggctgggtgcgctggctcacacctgtaatcccagcactttgggaggctgaggcaggcagattacctgaggtcaggagtttgagagcagcctggccaacatggtgaaactccgtctctactaaaaatacaaaaattcgccaggcgtggtggtgggcgcctgtagtcccagctacttgggaagctgaggcaggagaattactggaacccgggaggcggaggctgcacagtgagccaagattgcaccactgcactccaggctgggcaacagagtgtgactccgtctcaaaaaaacaaaaacaaaaacaacttctccctcctccacagactcctccctggtcaccactagtgatccaccttatggatctcccaaggccacctctgcctctgctctgtgttgtattatttggggacctgtggtctggcatgcattgtacttggtgccccaaagggctgtggcatctgataagtgatttatcctcaggcacagatttgcactatgtcaccactacttgtatgtagaagtgagtcaccggctggcaaatgggcatagctgctgggcagtggatgcagctccatgcatgttattctcatttgatacaggatctcattggcttctcacagcaatcctgtgcactataggtattgctcccgggaacagatgaggaaacaggagagtgcgagattacagtaattttgtaaatgggaggatttgtgaaggtttcagacatacaccctctctcatatgtcaaggatatgaagtctaatgaatcccctaaagcagcaggggttggcaagctgtggccctggggccaaatcagcctactgcctgtttttgtaaataaagttttattggaacacagtcacacccatcatcaatgtattatctagggctgctttctgttcattggtagtttgttgagtagccacagcagagacaggcttgcaaagtgaaaatactatctggccctttacagaaaaaaagggtcagtgtccctgctctaaagaagtatgtgtgaggtgccctggccacttatgggaagaaaagctgagcctattcagcaaggttttaggtggctcagattttatagaggaacaaacattgagctggcctgggaaggatgagcagaaggtcgtcgagtgtgttgggggctgggggactctacgcagtgggagctccttacatacaggcatgagaaagcctggtgtgcccctcagagtgtcatggagcctatggtaggagaatacggtgcataggaaagagtgaaggtaggagagtctgcatgctagatgggccaggcctgggatttctgtagtctagtgtgtcaggcagaggctctcaagctgggcttcatgacacaatgacctgtggaatgctcaaaaaatacatattcccaggctcctggctactgaattagaagagtcaggagaatgccctttaatctgctttttaaaccatgccccagataattctaatacaacaaattggaaggcctgatgagaccccactcagggaagggagggagggaggctggagactggagaccgctgccagggagcagggaggggcagtgggatcaggagggaaggcagggttggcagtgtcacttggacagggccaccatgccccaatcttgtatctcccacggcaccttgcacatagcatgtgtttactaggtatttattcaccaagtaaaataaggattctttgttcttgcatgttaaggagtgacacccaaaacacctgtaaaaagccagcagagggtaacattttaggcattttgggccacatgagttgtctgtctgttccatattcttttcttgttttttctttttctttttttcttgagacagggtctcgctctgtcacctgggctggagtacagtggcacaatctcggctcactgcaacctctgcctcccaggttcaagcgattctcctacctcagccaccatccccgcccccatcccagtaactgggaccacaggtgcgtgccaccgcacctggctaatttttgtatattttgtacagatggggtttgaccatgtaggctggtctcgaactcctggacttaataagcgatccacctgcctgggcctctcaaactgctgggattacagacgtgagccactgctcccaactgtctttttttgtttttttgttacaacccttaaaaaacgggcttgccattctcaccccaagcttcatggtacacaagccgcagcagccagactgtagcttgccaacacttgctagaccattgctcttcatgttcaaactgccagtcaggagcacaaggaccaggaagtggcctgacttggccaggaccactcagcccgttacagttaggaggagcggccagatctcagccccatccacttgggaagtcaggagaggcagtgaacacatcacctgaaagtcagaggtcttgcgaaatcaccaccaaagcatgtatttgtacaggtaatagtgctgagagttcaacagaggacagggagaaggtgacctgtgaagactgtgcagggagggaggacagccactcagggaacatgacggaccagctggggactgaggttccaactggttttattccagcactgggataagcacatagaaaacaaactataaccccatctgatttttatttatgaatagtcattaacacaagaatatcctgagaaggaaaaacctcctgtaaaatgttttcactttgtctcaagtaaattattctcaagtaacatttggggataagatccaatgtaaaaacaagagaaagttaggtctaccatttgtctcagccacttagttaagtaatttcatagaaaacttatggaactcaaggaattttttcaagcctatgtacttattcatcaacttgcttttattattcatttgcaaaatacccaaacagcattaaaaataagttttttcttcatggcgggtgaagaatacagaaatttgtctctattcttggttaacttttgcgggtcatttgatttatataaattcctcaagactctgaattcagacactttccatgtttgtaaaagatgttataattctgaggtcagatctgtgctttgctctgttcccagggcagttattaatcaggtaaatgcaaagttgattagaagaaatgggctatagttttcattgaataatttgagtttggggttattttcagcttttgtactttttttagccacacccaagcatttaacgtttcatgttcacaagaaggattcttgtttgctttttactctaatctttgatggtataactcccttgtggctctctgacaatcacaatgttagttcagctaatatgtctccagctcacattggggtctgtgttactgtgctgggtatgctatgtgtttgggatggacaaaggaagatgtggcccccgccttcgaggcggtcctggttaggggcacactgcaaagtggcacttggtatggtggaaacagcactgcaggcaggaggagaaaggctttctgtgtgtgttgtggttggtagttagaggaggcttcactgagaaccatggccttgaaagatggatgagatgtcacttagcagggaagggactcccaagcagaggggctacagagaggcaggaaagtacagagcttatggaaggaagaaagagcagaacagtgtggctgtgctgtttgcacaggtgtgggcatcgtggggcggttggttagaaactgacgggccagactggatggtgtggactcccccatacaggcatatagatgccactgttcaggcagagagaagccattagggaatagaagaggcatgtggtaattttagggtgattgtcctaaaatcatctttggctttggaaggggaagagcctagcggcagagactctagttaagaggctagtggaatactgatgaaaggcgccgtgagcttgaacaaggggcgaatggaacacggaaagaatgcagtccagatataggaagaaggcatggtccaaggaagagagggacggggtttgcaggttgtaaatcagaaaaatactgagacctttaaaagagtcaaaaccaaacaagcaaaacaggaaaatgaacagattctttagaggggtggtgatgtgcttgatgtactcagtgctgaatttgaagggtgtcctgcagcctgaggggtgttacgtggagatgcctggccagccaggagaaaggacagtggctttgggaggtgcatgcaggcgaacctcgattgtggtcacaacgggacaggaaggagtacagggccaagagtgagccaagaccagaatctgggacaatccagggcgaatttgttttatacctgtgctctccttgatctcccctcagagtacccaaaggcaagtggaacagctctaatggggttgaagaaaaggagacttgggtggaagaggatgaactgtttcaagttcagggtaagcagaagattctccttggcctcttcttgatgcttgctgaagtacagatgcgtgttactgtcatgttaatattccagaagctgcttgtctccgaactagaaaaagttcagtaagttcccgatctcattttaattcatgaagaatcagtttttttttttttttcctttttcagacagggtcttgctctgtcacccaggccagaatgcagtggtgtaaacatggctcactgagcttcaaccttctgggctcaagtgatcctcctgcctcagcctcctgagtagctgggactgcaggtgtgcaccaccacacctggctgtttttttcactttttgtagagatggggtctcactttgttgctcaggctggtctcaaactcttgggctcaagcgatcctcccacctcagcctcccagagtgctgggattacagatgtgagtcactgtgccctggtcaaggagtcagtctgatgtcctctcccattaaataatggagactgtcagagtaacgccttatgtttaaagagagttcttggttttgttttaataacgcctatgatatttaattatagttgatgttcttcctaaaatccttcaattagatgtggtagtagggggtcattccctgcatttcttgtttaaagaaaaaaaaatcttaacagtttctatatataaatcctttttttttttttttttttttgagacagggtctcactctcatccaaggtggaatgcagtggtgtgatcttggctcactgtagccgtgacatcctgggctaaagcaattctcccaccttagcctctggagtatcggggactacaggcccttgccaccatgcccaactaatctttttttgtatttttagtagagccaggtttcaccatgttggccagtatgatctcgaactcctgggctcaagcaatctgtctgcctcatcctctcaaagtgctgggactatacttgtgagccaccataccataccctaccaaaattgttttctttttttcttttttttttttgagatgcagtcttactttgttgcccaggctggagtgcaatggtgcgatctcggctcactgcaacctccgccttccaggttcaagtgattcttatgactcagcctccttagtagctgggattgcaggtgtgtcgcaccacgcccggctaatttttgtatttttagtagtcgggttttcaccatgttgggcaggctgctctcaaactcctgacctcaagtgatctgctcgcctcagcctcccaaagtgttgggattacaggtgtgagccaccgcccagacccaaattgtacttctataaaatgaacaaggacttgaaaattctaggctgggcgtagtggctcatgcctgtaatcccagcactttgggaggccgaggcaggcggattccttgaactcaggggttggagaccagcttgggcaagagggcaaaactccatgtctacaaaaaatacaaacaaaaaaaatttaggccaggagtggtggctcacgcctgtaatcccagcacttttgaaggccgaggcaggcggatcacaaggtcagaagttcgacaccagcatggccaatatggtgaaaccctgtctctactaaaaatacagaaattagccgggtgtggtggcaggcgcctgtagtcccagctactcaggaggctgaggcaggagaatagcttgaacccgggaggcggaggttgcagtgagctgagattgcaccactgcactccagcctgggcaaaaaaaaaaaaaaaaaaaaaaaaaaaaaaaattgggaatgatagtaagaggaagattaaaaaatgaaggagaaaaaaagaaaattttagtacaaaacagcaaaaccatatgatttctttttttttttttttgagacagagtctcgctctgttgcccaggctggggtgcagtggcgcgatcttgcctcaccgcaacctccacctcctgggttcaagtgattctcctgcctcaacctcccgagtagttgggactataggtatgtgccaccactcccagctaattttcatatttttagtagagaaggagttttgccatgttgtccagactagtctcgaactcctgacctcaagtgatccgcccgccttggcctcccaaagtgctgggattacaggcgtgagccaccacacccagccaaaaccatgtgatttcaaagcagtggttagcaaggggttataatgcagaaattatacatataaacacacctatagtcatgtgccacataacaaagttttggttaacgatggactgcatatatggtgacggtggtcccattaggttatatatagagctgaaaaattcatatcgcctagtgacattgtagatgtcataggcattgtaacattgtagtgcaatgcattactttgtctctgtttagatatgtttagatacacaatatttaccattgtgtcacagttgcatgtcacatgctgtacaggtttgtagcggaaaaataggctacaccatatatcgtaggcatattccttttttgcagaggttagctaagttaatagtaatcggtaagattaaggggattaggactgttatagcagtggaagaatacatgtttgttacttttatttggagttgcaccaatgtttttggttcctaagtccagtggatgactctagtcctttaaaagttgagaaagccatgttgttagacatggggacatgagttagcagttgtcagatactttctccatagataagaagttgcaggctagagcctaggctctaccatctaggtttgtgtaagtcacacaaggatgaaatcaccaaacgatgcatttctcagaacatatccccattgttaagcaacatatgactgtatatatacatacacacactaatacctatatgtatatgtagacattatatatacataagggttttaaatatgacgttccctcagtaattttagaaaacgatgttggggccaggcatggtggttcacacctggaatcccagcactttgggaggccgaggtgggtggatcactaggtcaggagattgataccaccctggctaacacagtgaaaccctatctctactaaaaatacaaaaattagccgggcacggtggctcatgcctgtaatcccagcactttggaaggccgagatgggcggatcatgaggtcgggagatggagaccatcctggttaacacagtgaaacccggtctgtactaaaaatacaaaaaaattagccgggcgtagtggtgggcgcctgtagtcccagctactcgggaggctgaggcaggagaatggtgtgagcctgggaggcggagcttgcagtgagccgagatcgctccactgcactccagcctgggcgacagagtgagactccttctcaaacaaacaaacaaacaaaaattagccgggcgtggtggcgggcgcctgtagtcactcgggaggctgaggcaggagaatggggtgaacctgggaggcggagcttgcagtgagccgagatagcgccactgcactccagcctggggaacggagcaagactccgtctcaaaaaaaaaaaaaaaaaaaagaaaacgatgttgattttactgaagagcttgaaacgcatcactagccagcatttacggatgcctgtttgtaaagcacttgcattgtacaggttctcataggctgaagtgactggtgtttgcaaataaaggagaaaagtaaattatcctttagtgatatcctttctcttctcaatgcttgtgaaatttgaagaagttttccctttggggacattccatgtctttttcttgtggtttgtgcagagaaaggtgaactctgaaatgagtctacttttaatgttttccagcagcaccagatgaagacagtacaaccaatataacaaaaaagcaggtaatttaaaattctcttttctgttactggttatgtgggtagagcagaggtaaaatacgcgccctgtctcacaggtatagactggttatgtacccagtaaaaacctttttttgagattttcagataatccaaactaagttaaagtaataattatcttctggaagaaaagactaggaaaacagatgacacattttccggaacatgaatgatgtagatatgtttgcagtttggaatgcagaagtgattgttacttgaggatcaaatggcaggacatcaagaattcctgtgtccagatccacagtgctcatatcttgtccattccatgtttaaaaacataagctgtgatttcaggttcagatgattctcctgggattcttgagtttaccttatcactacattggagaaaatgtaagtaagtggagaggaaaggtggtaataaatcttttggttttcttttgcagaagtggactgtagaagaaagcgagtgggtcaaggctggagtgcagaaatatggggaaggaaactgggctgccatttctaaaaattacccatttgttaaccgaacagctgtgatgattaaggatcgctggcggaccatgaaaagacttggcatgaactgaaacaggctttcatttccacagaattcacaggagcatggttcctaataatagcccctgatagtctgctctttctttctttttcttttttttttttttttgagacagagtctcgctctgtcacccaggctggagtgcagtggcgtgatctcggctcactgcgacctccgtctcccgggctcacgccattctcctgcctcagcctcccgagtagctgggactacaggcgcccgccatcacgcccggctaatgttttgtatttttagtagagacggggtttcaccgtgttagccaggatggtctcgatctcctgacctcgtgatccacccaactcggcctcccaaagtgctgggattacaggcatgagccaccgcgcctggcatctgctgtttctttcagaagctgggctgggatgagaattttgggcaacctccttcgacgtgggggaggtcccatttccacttcatcactgttggagatcatggagctaagaagcagagccaagtccacccatgtccttggcagagatgacaggcacacagcttgtgcagtgccagaatatcattagcgtttcccttctttagtggtttgcttaaatttaaatccctggtaatctgtagaaccttctcctaggaaatggtgaagtctattaggagccacttgtgactccatgacctgttaaaaccagcaatgtgagtattatttggagtaaatttgttccacgtcaagttctggccttctgatgcaaatgcaaaggaacttagtctgttatgaacccaggttgatgacagaccagtccttgtggaataagattccctttaaaaactctttagccagtcgtgacatcaaccctagacctgtctgccttggcatttgctgtcaacatctgctgggctatgtaggcaggttaatcctccacttctcatgtggttgaaccagtgtgttttttggtaaaatggtgattgtagataagattagttccctgatcccctgccccctgtcccctgcctcttttcccaattcccttccttatgctggacttttaaagcttaaaaaaaatccgattgaatataaatgcctaatttcattctttgtgaaatggttgcttcctcctgattccctaattgtgctgtgttcgtgtcttgcactggaattcaacattcccttctccttttgtactgtgttgtgcttgctgtctctcccggacacccttaaagactgtctttttagcaaaaaatttcagtaaagtgttttctgtaatctttttttaaaaggtgagaactaattattgtccatacttgtagcattcttcattaaagtcttgcttctctcaactgtaa

SEQ ID NO: 3980 - DNA, 568 bp, Homo sapiens
gctggtctcaaactcctgacctcaagtgatccgcccgcctcgacctcccaaagtgctggcattacaggtgtgagccactgcacctggcctctatataaattcaaattttattatttgaaaaggtaatacatgtacataatacagaattcaaaaggtataaccaaagagtttggtgaaaatactctcatctgtgaccctcagccatcttcttcccttcagaggcaaccaatttctttttttttttcttttatcctttcaaagatcctctatgcatgtgcaagcaaattgtgtgtgtgtgtgtgtgtgtgtgtacagacatccacatagatccattttctccattcttctcatacacatacgtgatagcatatcctacacactaatgtgaacacttttctaaattgcttttttcacttaatattatatcttggaatcattctatgttagcatataaggaacttctttatctgttttttatagctgcatagtaacccactgtggctgaacctgatttattgaccaatcctttgtgttgggcttcccttcctgtatgtgtgccagtgatttg

SEQ ID NO: 3981 - DNA, 4485 bp, Homo sapiens
tgagaaatgatctcctgaatattattcgagaaaagaacttggcccatcctgttatccagaacttttcatatgagaccttccagcagaagatgctgcgcttcctggagagccacctggatgacgccgagccctacctcctcacggtgcgccttggcccttctcccataaccatggtgtgcccttgaggatgtgcggggaatcagaatatctgaagtgaaaagagttgatgtgtgaaaaagacattgaattgtatgcactagctttcttaattaaatgccttaaaaatgcaaaagcaggccaggcgcaatggctcacgcctgtaatcccagcactttgggaggcccaggggggtggatcacctgaggtcaggagttcgagacctgcctgagcaacatggtgaaaccccatctctactaaaaatataaaaattagctgggcgtggtggcaggcacctgtaatcctagctactttggaggctgaggcaggagaatcgcttgaacccaggagatggagattgcagtgagccaagattgcgccattgcactccagcctggacaacagagcaagactccgtctcaaaaaataaataaataaataatacaaaagcagagatactggcagaggcaaatggaacacacctggtctccctcatctgccatttttatctcctttacacatggttaatctgccatggttgaagtagaacattcacttgcaatcgatggtggttcccaaaggcgatgacttgtgaactaagtttggaggaagggtggtttggtagatgtggtacgatggagttgctaacaggaagaaggcatggtgtggagaaaggtgtcactgaaagtataaagttgaaagaagccaaatgaaaacattctttaattggatcaaagagataaaagaatggaagcagtgaggctcaggacagcatagggaagaactagacccaggctgtcatagatgggagactgtggtgaaggaacactgagtgagagtggttttgttttgtttttgaaaccaggactttggcccagtacagtggttcacacctgtaatcccagcactttgggaggccaaggcaggcaggttgcttgagcttaggagttcaagaccaccctgggcaacatggtgaaaccccttctctacagaaaatacaaaaattagccaggtgtggtggcgcgtgcctgtagtcccagctacttgggaggctgaagtgggaagatcacttgaggctgccagtgagctgtggttgtgccactgcacttcagcctgggcaaaagaaaccaggactttgagaatgtggaaaatattctgtctcgtaacagatctgccaggcccatattaggatagtgtccatgatcttagcagtcgtttggcaaatctcagattatttataagcaggtagtttgggatattcaggcagcaggtgtcaagatagttgagcctggcctagggtcctttcctttccattccaggtaactggaaactatccttatctatataacacaaagagccctgattagcctactcagggctctttgtgttatatagataaggattctcaaacagttgttaataaggcaaaacatttgtagaaacagttataaaaattctatacacaaactggaagatattagtatgaacatttattgccgggcatggtggctcatgcctgtaatcccagcactatgggaggctgatgcgggcagatcacttgaggtcaggagttcgaggccagcctggccaacatggtgaaaccccgtctctactaaaatacaaaaattaactggacatggtggtgggcgcctgtaatcccagctacttgggaggccgagatgggagaattgcttgaacccaggaggtggagattgcagtgagccgagattgcaccactgtgctgcagcctgggcgacagagcaagactccctctcaaaaaaaatgtattagttatcttaagtttgaataaaaaaagcttgatttataagtcttacaagttctctcccattttatgtccttcgttttatgcctagattggatttgtaagtgaacttgtttgcatattgagtatattcttggtgaaagaagcagagaattaatgcaattctgtggcctcttcttcctgatgacatccttcctttcccagatggccaaaaaggctttgaaatctgagtccgctgcctcaagtacagggaaggaagataaacagccagcaccagggcctgtggaaaagccacccagagaacccgcaaggtaaaaagatgctctcttgtgatcttgggtaaaacactagggtggtcgctggaagcagtctcctccttaggccaggatcagttcctctcagcactccgacctactaacgtgttacgaggttactcatacaaggcactgggggagactgcacaccctgggaagataaggaaacaggatgcctggggtccctgacaacttcctgactggccattcctcaaaggctctttcaccatttctctctccttgcctcccccgtattgactcagtacttttcttgtggacacctaatctcttaatacattcaggaagcactgctcagatctgtgagtcgaatcccaaaaccagttcctaaagcaggggtcacaagcttagatgccctttgagggccggttaggaaacctaaaggaacaaagtggacctaggctgagagcatggggctgggaaccaggggatgtgcttttcagcttcttgtggttgttgctctgtgggagtatccaaggatgctcaggcttcaggtgctcagatttttgtatgagatgtccagggttttccatgagatttcccagtttttggatgttaacagttgatccacttaaaaaattttttttcatgttggttagacaacaagacaggctgccagatggatttggcctgcaggctgccagtttgccccctctcctaacagtttttccctaaagcatactaactgttccaaatgatagatgaactttatttttaaaaggcagtttctcattgttccaagactgtgtggcatgccttttactctgagaattctcaagatcctgctcttaagtgtgttgtaggccgggtgtggtggatcacgcctgtaatcccagcactttgggaggccgaggtgggtggatcgcttgagcccaggagttctaggatacagtgagctgtgtttgtgccactgtatcctatctctctgtcctatctactgtctaggacagacccagaccctatctctaaaaataaaatgagaagtaaaataaaggttctctaacttggagttttaaattcataatacaacttacatatcacatttaaagcctcctcaactggaatttgaagcttcaaacttcaaaaaagttgtggctgtttggatgagcatcatcagtggtgaaaaacatctttgtgcctatgcttgatttgcaggcagctacggaatcctccaaccaccattggaatgatgactctgaaagcagctttcaagactctgtctggtgcacaggattctgaggcagcctttgcaaaactggaccagaaggatctggttcttcctactcaagctctcccagcatcaccagccctcaaaaacaagagacccagaaaagatgaaaacgaaagttcagccccggctgacggtgagggtggctcggaactgcagcccaagaacaagcgcatgacaataagcagattggtcttggaggaggacagccagagtactgagcccagcgcaggcctcaactcctcccaggaggccgcttcagcgccaccatccaagcccaccgttctcaaccaacccctccctggagagaagaatcccaagtatgaagaccttctttgtagaaattttggggctggttggtggtcctggttgggcctggtattacttccgtgaatgaagtaactttcagctaagttactcaccaccaaggcttgctcagactgctagaacttgacgcaggagtggccagtgacgacgtagccatccctgccggttctgaagccccgcatgtgggcttccaagccttgcactagggcatgagtgggaatggaaaggtttcagagcctcctactcatcgctgctttcatttttagcaaacatctgagtgtcttgacttctaaacattagtcttgtgtgttaaaagaaatttgtttgcattgggccacattatactttgacccttaaaaagagactgatgaatatgtataattttgcacccttctgagcatttgagacttggcaagttcagtgaatacttactaatctcccatgtcctgctaggtactgtggggcagtggctagaatactttaattttgctccccattgtgattctcatcctggctttgagttttgcttccctttgtgtcctgtggtggatcctccctccaggcagactggcctgcttgctctctggaacatgttgtttgtttctaccactgtacttttgcttcctctcattccccacagtggaccgtcatcccttcat

SEQ ID NO: 3982 - DNA, 568 bp, Homo sapiens; identical to SEQ ID NO: 3980

SEQ ID NO: 3983 - DNA, 565 bp, Homo sapiens
aaaaaaaaaactagtactaccaatgaaataaatgcaacagagttggagagctcaagtcacgtattcatttattctacaaatactctctaaatggctactctgtaaccaagcattttatattgcttttttattgagagaggacatacatgtttagaattcacacagctcaagtatacagcttgaccaattcttacattagtgtccatccatgtaaccatcatccaatttaagatgtggaatatttctagcagctcagaaggttctcttgtgccttctccccgttcctaatcccctccaaaagatacccattattttgacttctatcactgtgggatagttttgcctgctcttgaattcacggacattcaaatcgactcatccagtacatactcctttgggtctggtctgtttcgttcaacattatgtccaggaaattcatccctttgcttatgtgcaactatagttcattctttttctttgatgcacagaatactatgccattcaatacacattgaacaatatgccacaatttgtttgtccggcattatttttaaagcaatcttgt

SEQ ID NO: 3984 - DNA, 628 bp, Homo sapiens
atacaccaacttaatataaacccttttcagagaagataaaggaattagctgtttaatgactacattgtggtgaagttttaaagccactaaatgggaggtccattcccatggcaccattgctagcagcccaaacacagtctgcagaaacactcatttcagtggctgacttcagtcagtaattgatacagcaaaatttcattctaacatttcaaagctgtctcacagaatttctgagaaaaaagtgttcccaatcactgatttcatcatatcgcgtcaatattacttcagcacctttaatgaggaaatcattgaaacacactcatcatctttggctagagagatttatgttactcagaggttttgcagctggtgtggcagtgggtggcaatagtgaatttgcagttttgaaaaaaattaaaaagttacgagaagaaaagagaataaacaaagagaaagggaaatgaagcaagaacaaaagagactcaatcatagtgttagaaaattcctgcaaacttcttgatcctgaagtctccaaaaaacctcagacctcccaccgatgttacagtatctttcatctggggctcaatctagaatcttttcggttcctggtaattcctctgagtgcttc

SEQ ID NO: 3985 - DNA, 1978 bp, Homo sapiens
atacaccaacttaatataaacccttttcagagaagataaaggaattagctgtttaatgactacattgtggtgaagttttaaagccactaaatgggaggtccattcccatggcaccattgctagcagcccaaacacagtctgcagaaacactcatttcagtggctgacttcagtcagtaattgatacagcaaaatttcattctaacatttcaaagctgtctcacagaatttctgagaaaaaagtgttcccaatcactgatttcatcatatcgcgtcaatattacttcagcacctttaatgaggaaatcattgaaacacactcatcatctttggctagagagatttatgttactcagaggttttgcagctggtgtggcagtgggtggcaatagtgaatttgcagttttgaaaaaaattaaaaagttacgagaagaaaagagaataaacaaagagaaagggaaatgaagcaagaacaaaagagactcaatcatagtgttagaaaattcctgcaaacttcttgatcctgaagtctccaaaaaacctcagacctcccaccgatgttacagtatctttcatctggggctcaatctagaatcttttcggttcctggtaattcctctgagtgcttcatgtctgtcatcacagttttattaaagaactttacttgtgtttggaaagattgtgtgcatgcgtgtctgtagccagttgcagacgtattgtctcagtaagaaaataaatcctatttgttttatgaaatcagtacacaaataacagttgccacagtgtaccagtatttcaatttctaaagaataccatagagtctgaattagaacctttaactagattgcaaaggaatatactaaattgaaaacttgtaaaagggaagtaataaacaccataatcctagataagatcctatggtctttcagagtttttccatatacagtaattatttgatgtacagtaattattgataaccaaaatgacaaaaactgaatctactcttcaaattcaaccatgtatcttaaaaaggagtaaaatgtactgttttcagtgtttcctttggtttcttacagtttataattttataaattaacttcatagaacatattttataaatgttctgtctctcctaacataaattttgaattataccattgttatttgatagtacaaattatgtaaagtaatatgcaaaataagaacacattttgccttaaattgtattttgatattttagaaccatttctgaaaacagctcattttaacaagacgagatgtctgataacagaagagaaaacctgtctgacttaggtttaagctcaggcgaaaaagaagtgttttaagcatttgaaggaactgataatacctttattagagttcatctgttcttttactatatgaaagtatgtcacggagctgaactgtacctgtttgtgatgtgatacctccttttctcagtcaactgcacgttttcaacttaagtttacttaaaattttctgaaaagaaatgtacaaagacagccttcaattaaggattaatcactatggcaactgagatgtggtgactgaagggggaggatgtattctcccctcagtttcctgccagctgtcatagtcaacctctgctgcctgaatccaagccaaaatatagactgtgaccaactctaagaaactatatctgtatttttataaattggtacaagtatcagactataaaagaagacttaatcccttgaattggatgacagacacttggcactcttgcaagtgtttgacagagaaataacgggtcgctttgtagtaaaacctggattaatagtaagcccctctttatgttattgcagtgtggtgtaaatgagagaactaagcatgctgtcagcctggggtgggaggtagcgtgggggagtgtcttttatataaccagtgcaggtttaagcactgttcagaatactgtaaatacaaaatattgtgttagt

SEQ ID NO: 3986 - DNA, 410 bp, Homo sapiens
ggaatcatgtagttcaatcagaaccaaaaccatttctgcttatatggaaaaaggaaagtgtgtgattaggttgctccacaatttttcacctaaaatgaagaccaacatagaaaactcatttcatatagaatttatatttttagcaaaagggtttttatactgttaaaagtcataaatacttcctatgggctcttcccacttaaaattgctgttgtgatatttttgtttatacatagtcactttcatcaaaggtttttaaaaaatattttcttgtgtttggcttattattctttattattttctaagagctaagtgcctcaggagtaattttactattactttatgggcaagagttcagaatgcatactgtatataataccaatattttatttcaacttagtgctattata

SEQ ID NO: 3987 - DNA, 410 bp, Homo sapiens; identical to SEQ ID NO: 3986

SEQ ID NO: 3988 - DNA, 389 bp, Homo sapiens
agtcttctttgaacagtttctctgttgagaatagtcacaagatctaaatagttaaaaaatagtagttcttcaaataatgccttcaaggcaatgatataaaaatttaggaatagaggcctcattcaactctgactgactctaactagtggattaaagaatgttacgcacttaacagcccttttcaaattctattttatccttctctgaaaaccatagtatcaattggacatggccccctaatggaaacacctattgccttgtcatctgaaaatcctgcctctgtcttaggaattctgaatttttataggtgaataaagcaaaattacagattaaaggaattacagtatttcagaatttgaaggattcttgaagactatttaacccaaaca

SEQ ID NO: 3989 - DNA, 12452 bp, Homo sapiens
atctccaccttccccggaagcctccctttgccaggcagaaagggtttcccatggggccgcccctggcgccgcgcccggcccacgtacccggggaggccgggccccggaggacgagggaaagcaggccgggcgccgtgagcttcgcggacgtggccgtgtacttctctcccgaggagtgggaatgcctgcggccagcgcagagggccctgtaccgggacgtgatgcgggagaccttcggccacctgggcgcgctgggtgaggccgggccctccggccgggacccccagtccgtcggtgggaagcggtgatcggtgtccccagaggctagtgggctggaagcggggcgccgagggagcagtctcattctcccctcccgtgcgctcagccgagcccattgtttctccttcgcaggattttcagttcccaaacccgcttttatctcgtgggtggaaggagaagtggaggcgtggagcccggaggcccaggatcccgacggtgagagctctgcagctttcagcaggggccaaggacaggaagcaggtacttcatttggataagtagccgtggagaagccccaacccccgcccccaactcactcacatcctcagcgcaggctgccccctccaaagtcccatcctgtctccctgcaccctaccccagaaacgtcctcatctcactgcaaaatggcccgatggaacagcgaaattgggatctatggaaccgattaaccatactggaaaacctcagtttaatgcaaaatagagcttgagcttcctaggaggtcaagggaaaggggaaacctgtaatttgatttttgttgtgggataaaatgaagacagatgttcctcttggatattaatgatgtgaaccacgtgtagtaaataacaccattaattagatttttaaatgaagagaaatgtttttcctgcagccctgataccagaataaatgcttgttcccagaaggtcttcccgtggaacctagtgaggcagtccaagtgtagacttattttttgagacagtctcgctctgttgcccaggctggagtacagtggcatggtctaggctcactgcaacctccgcctcccaggctcaagcaattctcctgcctcagcctcctgagtagctgggattacaggtacccgccatcatgcccagctaatttttgtatttttagtagagacgggctttcaccatcttggccaggctggtcttgaactcctgatctcgtgatccacctgcctctgcctcccaaagtgctgggattacaggcgtaagtcactgtgccccaccagcaagtgtagactttttggtgatggtaagagcagagaggaaaggtgccaaaagaatttgagctggtaccaaagaaggtcattgaatggctgttttgtaaagggatcataaacaggttcaggatggtaagtgccatgaggactgggaccatcactgtgtcctcaaagcctgacacagagttaagcgttcaatattgttcactcctttttctttttttatttttttgagactgagtcttgctgtgtcgcccatgctggagtgcagtggcacgaggttggctcactgcaacctccacctccccagttccagggattctcctgcctcagcctcccaagtagctgggattacaggcgcccaccacctcgcctggctaatttttgtaatttagtacagacaaggtttccccatgttggccaggcaggtctcgaactcctgacctcaggtgatctgcccaccccagcctcccagagtggtgctgggattacaggcatgggccaccacgcccagcatttttttttttttttattagagagttgcccaggctggagtgcagtggcccgatcacagctcactgtcccttgaatttctggcctcaagcgatcctcccacctcagcctcctgaagtgcttggataacaggtgtgagccatggcacccggcccgactcctctttcattatctccagtgctcagggccttcttgtgttaacctgcagaccatggcatttgcttttactccaggctggctttcagggcttcatgaggcccctatcattaagccgtgctccctgggcgccatattctgaaccattcctgctgccttccaaggcaggacatggtcccggaatatgctggttttgactttatcatctttcctgtctcaggatccagggatgagtttctgattttatcatcttccctgtttcaggatccagggatgggaatgaggagaaggaaaggctgaagaagtgtccaaaacaaaaagaggtggcgcatgaagtggctgtcaaggagtggtggcccagcgtcgcctgcccagagttctgcaaccctaggcagagccccatgaatccctggctcaaggacactctgacccgaagactgccccactcttgcccagactgtggccgcaacttcagctacccttccctcctggccagccaccagcgggtccactccggggagcggcccttctcctgcggccagtgtcaggcgcgtttctcccagcgcaggtacctgctccagcatcagttcatccacaccggcgagaagccctacccctgccccgactgcgggcgccgcttccgccagaggggttccctggctatccacaggcgggctcacaccggggagaagccttacgcgtgctcagactgcaagagtcgcttcacttacccctacctgctggccatccaccagcgcaagcacacgggcgagaagccctacagctgccccgattgcagcctccgtttcgcctacacctccctgctggccatccacaggcgcatacacaccggcgagaagccctacccctgtcctgactgcggccgccgcttcacctattcttccctcctcctcagtcaccggcgcattcactccgacagccggcccttcccctgcgtggagtgtgggaaaggcttcaagcgcaagaccgccctggaagcccatcggtggatccaccgctcctgcagcgagaggcgcgcgtggcagcaggccgtggtggggcgttcagagcccatccctgttttgggaggcaaggatcccccagttcacttccggcactttccagatatatttcaagagtgtgggtgatggcgttcacacaaactggtcagcgtttccctggagaggaagaggcaaggtttgtgtatttgggggataaggaaaggaagtgggcgtttgaggaaaacaaagttctgccttaggtaaaaagcagaggtaggggcacagagggctgtggggaggaggcaggaatctgaaaaggtgcctgggggttgaccccattttctgaagctccagcacacagggccccgtgttcacgtcccatccttcactgaaaaccattcacctaactggcttttccttcatgattgttctctcccttgtagctctctgctttttggcctgtatctctcctactcctctgagatggggtcccctacattccagtgcctattaaaggagcctgcacccactctggaccccccagaatagaggggatacctcaggcctgtccctcggctggtggggggggcggagctcatcccaggattcttttcttttttttgagatggagtcatgctctgtcgcccaggctggagtgcagtggcgtgatctcggctcactgcaacctctgcctcctgggttcaagccattctctgcctcagccttcccattagctgggattacaggcatgcgccaccaggcccagctaatttttgtgctgttagtagagacggggttccaccatcttggccaggctggtcttgaattcctgacctcgtgatccacccgcctcggcgtctcaaagtgctgggattacaagcgtgagccaccgacccctgccgaggattctgccttttaccaatgcaggtgaaacatctggcaaggagacacctggagtgtaggtgttccttggtcttgaagacctagaggtggccatagagaggacagtggcctcaggtggggaactccccccccactctcattctgcaagtgcacaaactatcaaacatagcggactctggaactgggccaactcttcactgtatgcattagtgattgcagtgtttttttcttcttcagatatttgcatgttccctggattttgtattttttgataaagatatattcttgggccacagtagctggagatataatgccggaggattcttttttttttttttttttttgagacagagtctgtctctattgcctgggctggagtgcagtggcccaagctacgctcactgcaagctccacctcctgggttcacaccattctcctgcttcagtctcccgagtagctggaattacaagcacccgccaccacgcccaactaatattttgtatttttagtagagacgggggtttcaccgtgttagccaggatggtctcgatctcctgacttcgtgatcctcccgcctcggcctcccaaagtgctgggattacaggcgtgagccactgcacccagcctctttttttttttgagatggagtttcgctcttgttgcccaggctagagtgcaatggcatgatcttggctcactgcaacctccgcctcctaggttcaagcgattctcctgccccagcctcttgagtagctgggattacaggcacccacgaccatgcctggctaattgcatttttactagagacaggtttcaccatgttggccaggctggtctccaattcctgacctcaggtgatccacccgacttggcctcccaaagttctgggattacattttttttttaaagaaagaataaattaattgtgattaaagttgaaatcaaggcatagtctttccagtctaatttttactgtaatgcttgtatgtcaacagttatgaaggccaggcgcggtggctcacgcctgtaatcctagcagtttgggaggctgaggagggtggatcacttaaggtcaagagttcaagaccagcctggccaatatggtgaaaccccatctctactaaaaataccaaaaaaaaaaaaaaaaacggccaggcacgttggctcacacctgtaatcccagcactttgggaagccgaggcgggcagatcacgaggtcagaagatcgagaccatcctggctaacatggtgaaaccccgtctgtactaaaaatacaaaaaaattagccaggagtggtggcaggtgcctgtagtcccagctacttgggaggctgaggcaggagaatggcgtgaacccgggaggcggagcttgcagtgagccgagactgcgccactgcactccagcctgggtgacagagcgagactccgtctcaaaaaaaaaaaaaaaaaattagccaggcctggtggcgtgcacctgtaatcccagcttcttgggaggctgaggcagaagaatggcttgaacccaggaggtggaggttgcagtgagccaacatagcgccactgcactccagcctgggcaacagagcaagactctatctcaaaaaaaaaaaaaaaaaaaggcctggtgtggtggctcacgcctgtaatcccagcactttgggaggctgaggtgggtggatcacgaggtcaggagatcaagaccatcctggctcacacagtgaaaccccatctctactaaaaatacaaaaaattatccgggcatggtggcgggcgtctgtagtcccagctactggggaggctgaggcaggagaatggcatgaacccgggaggcggagcttgcagtgagctgagatcgcgccactgcactccagcctgggcgacaaagtgagactccagtctcaaaaaacaaaacaaaacaaaaaacaacagttaagagagttctttctggcccatttagatctgctagccctacttttgaagaggaaacttttgaaggaatgaacaaaagaggtaggtgggactaagcatttctgcattccaggactggtggtcagtgactcaaatatctctttgaaaagactgcttctttgaatccttgggttccaagataattaatgggaactggtgccgggcacggtggctcacacctgtgatcccagcactgtgggaggctgaggctggttaatcacttgaggtcaggagtttgagaccagctgggcaatatagtgaaaccccatctctaccaaaaaattagccaggcgtggtggcacatgcctgtagtcccagctactcaggaggctaaggcaagaggatcacttgagcctgggagacagaggttgcagtaagctgagatggctccattgcactccagcctgggctacaaagcaggactctgtctcaaaacaaaaacagatacaaaaactgggaacggggtgttatctttacttcaccacatagcctctcctgaattggtggacctggattcctagcttggctcagtccccactggctgtgtggcctttagcatcacctagattctacaaataacatttttctctatttgttttacacatgtcaatctgcctatccatccctctatccattcatttatccattttattaatgtatttcaaagtaagttgcagacatcattacatttcacttctaaacacttcagcatacagctgagttttatgcaagaaacttaagctctcagctgggtacagtggctcacacctgtaatcccagcactttgggaggctgaggcaggaggattgcatgagattgggagtttgagacgagcctggaaaacagcaagacctcatttctactaaaaattttaaaaattagccgagcatggtgggggagggtgaagaaggaggatagcttgagcccaggagtttgaggctatagtgagctatgatggcgccacttcagtctgagtaacagcaagacactattaaaaaaaaaaaagagccaggcgcagtggctcacacctgtaatcccagcactttggtaggccaaggtgggcagatcacctgaggtcaggagtttgagaccagcctgacgaacatggagaaaccctgtctctactaaaaaaaaagaaatacaaaattagccaggcatggtggcacatgcctgtaatcacagctactcgggaggctgaggcaggagaatcgtttgaccccaggaggcggaggttgcagtgagccaagatcgtgccattgcactccagcctgggcaacaagagtggaactctgtttcaaaaaagaaagaaagaaattcagctcccacttaaagttcagttgtactctgttattgacaagtaaagtcgattgaagcccagtcatctcctgtatgttgtgtgacttctcataattatctgatcaagagtcttgaagaaacatttacaatttgatgggcaataaaataatttgaaagcaagagcattttgttgttcttgttatttcttgagacagggtctcactatagcctaggctggaatgcagtggcacagtcacggctcactgcagcctcgacctcctgggctcaggtgtttctcgttctcatctcagcctcttgagtaactgggactacaggcatatgccactatgcccagctaatttttgtattttttgtacagatggggttttgcccaggctggtcttgaactcatgggctcaagtgatctgtctatctgagcctcccaaagtggtaggattacaggtgttagccactgtgcccggccaatttttgtatttttataatgagtggcaggaaaaacaactcatcagctacacggaacagttttagtcttacttgaaagtttgtttcaggcctggcgctatggctcatacctgtaatcccagcactttgggaggccgaggacggtggatcacttgaagccaggagtttgagaccagcctggccaacatggcaaaaccccatctctactaaaaatacaaaaattagcaggttgtgctgttttcagctacttgggaggctgaggcacgagaattgcttgaactcgggaggcagaggttgcagtgagccgagattgtaccactgcactccagccttggccacagagtgagactctgtcttaaaaaaaaaaaaaaaccacaggccgggtacagtgtgcagtggctcatgtctgtaattccagcactttgggaggccaaggcaggcggatcacgaggtcaggagatcaagagcatcctggccaacatggtgaaaccctgtctctgctaaaaatacaaaaactgggtgtggtgatgcgtgcctgtaatcccagctactcaggaggctgaggcaagagaatcgcttgaaccagggagttggaggttgcagtgagccaagatcccactactgcactccagcctggcgacagagcgagactccatctaaaaaaaaaaaaaaaaaagtttctttcaatctgtttagttaatatttttattgttcagcttcatcttcttaagtcttctgcatacttagttcaaagagaagtgatttacaacataggatctgaagaaacaaaagtatttttggttcaagttgctactctgtttaaaaggagaatccaaatagccactcacctgtagtcttagctactcaggaggtggaagtgggagcatagatcacttgagcccaagagttccaggctgcagtgagctttgatcttgccactgcaccccaacctgggtgacagagtgagactctgtttcaaaatgacaataataggctgggcatggtggtccacacctgtaatcctagcactttgggaggctgaggtgggaggatcacttgagcccaggagttccagaccagcctgggtatcatggagagaccccatctctacaaaaacgaaaattagccaggcatggtgttgcacacttctagttccaacgacttgaaggctgaggtgggaggatcacctgaacccagggaggttgaggctgcagtgagctgtgatcataccactgcactccagcctgtgtgacagagtgagaacctgtctcaataataatgataattaataataataatcataatagaaggagaatcaaaataaaacatgcagatggtcaacaggtacatgaaaaaatgctcaacaccactaatcatcagggaaatgcaaatcagaactacaatgaagccggcctggtggctcacgcctataatcccagcagcttaggaggccgaggtgggcggatcacctgaggtcaggagtttgagatcagccttcccaacatggtgaaactccatctctactaaaaatacaaaaattagctgggtggctgggcgcggtggctcacgcctgtaatcccagcactttgggaggccgaggtgggtggatcatgaggtcaggagatcgagatcatcctggctaacacaatgaaaccccatctcttctaaaaatacaaaaaattagccggcgtggtggcgggcacctgtagtgccagctactccagaggctgaggcgggagaatggcgttagcccgggaagcggagcttgcagtgagccaagatcgcgccactgcactccagcctgggcaacagagcgagactccatctcaaacaaacaaaaaaattagctgggcatggtggtgcacgtatgtaatcccagctactcaggaggctgaggcaggagaatcggttgaacccaggagggggaggttgcagtgagctgaggttgcgccactgcactccagcctaggctgcagagcgagactgactcaaaaacaaaaaagcacacaatgagatattatcgtaccttagttagaatggctgttattaagaagacaaaacatgacaggtattggcaaggatgctaagagaaggcaactcttgactgggcgcagtggctcacgcctgtaatcccagcattttgggaggctgaggtgggtggatcacctgaggtcgggagttcaagatcagcctgaccaacatggagaaacctcatctctactaaaaatgcaaaattagtcaggagtggtggcacgcgcctgtaatcccagctacttgggaggctgaggcaggagaatcgcttgaaccctggtggcagaagttgtggtgagccaagattgtgccattgcactccagcctgggcaacaagagtgaaactccttctccaaaaaaaaaaagaaaaaaaaagagaagggaactcctacacactgttggtgggaacgtaagttagtacagccactactgaaaacaatatggagatgtctgaaaaaaacaaaaacagaactaccatgtgggctgggcatggtgactcacacctgtaatcccagcactttgggaggccaaggctggtcgatcaccagaggtcagaagttcacaatagcctagccaacatggcaaaaccccttctctactaaaaatacaaaatttagctgggtgtgatggagggtgcctgtaatcccagctacttgtgaggctgaggcaggaaaatcacttgaacctgggaggcagaggctgcaatgagccgagaccagggcattgcactccaacctagacaacaaaagcaaaactccgtctcaaaaaaaaaaaaaaagaactaccatgtgatccagcaatcccactacctggaatttatccaaaggaaaagaaatcagtatataaaaaagataacctgcatctccgtgtttactgtagagccgtgtttacaatagcaaagatatggaatcaacctaagtgttgatcaggggacaaatgaataaagaaaatatgatatatatacacagtggacttaagccataaaaaatgaaatcatgtttacagcatggatggaactggaggtcattatgttaagtgaataagccagacacagaaaggcaaatatcacatgtcctcacttacatgtgggagctagaaaagttgatctcatggaggtagagagtagaatgataccagagattggaagggtgtacgtgggtgggagaggtggatgaagagaagttgggtaatgggtacaaacatacacttaggaagaagggataacttgtaatgttcaatagcagagtagggtgactgtagttaacaaagtactgtaaatttccatagctagaagagaggacttgaaattttcccaacacatagaaatgttaaatactcaaagtgattgataccttaaatatcctgacttgattattgtacattctatgtatgaagaaaagcaaaatatcacatgaactccataaatatgtaaaaattttgtgtatcaatatattttttgttttgtttgttttttttttttttagatggagtcttgctctgtcacacaggctggagtgcaatggtgtgatcttggctcactgcaacctctgcctcctgagttcaagccattcttgtgcctcagcctcctgagtagctgggactacaggcgtccgactccacacccagctaatttttgtatttttagtacagacggggttttgccatgttggccaggctggtctcgaactcctgacctcaggtgatcctcccgccttggcctcccaaagtgttgggattacaggcacaagccactgtgcccagcccaatttttttttctttttgagacggggtctcactctgtcacgcaggttgaagtgcagtggcatgatcttgctcactgcaacctctgcttcctgggttcaaggaattcttgtgcctcagcctcctgagtagctgggactacaggtgtgcaccaccagacctggccaatttttgtatttttagtagagatggagtttcagcatgttgcccatgctggtttctaacttctggcctaaagcaatctgcccacctcagcctcccaaagtgctgagattacaggtgtgagcaactgggctgggcctaaattaaatattttcaaaatttaaaaaatactcatttctaaggatatatttttccttatataatttctacagtattcaccacatggagtgcagtgaggcagttccagaactcaaggtaataatgtaagcatattaataatatttaattattaacaattaataattaatcaattaataacatatgcatatgagatcagcaggagtcacactaaaagccaaaaagcatttcaggtgaaaaacagcaagggtaggccagaaaacacaaagaaatcttgactgaaaagtcagcaataaaaaacactattgaataaaaaggaaggctcgatatactagggctggcaggggagccaagcaagtagatccagagccagaatgacagcagggacctggtaggccttgcttgttatctccagcaaccagccccacgcttagcaaacagtattctgcatcctgtatgattgcaggtatattccaaatgtggggatgaaggcaactagtatttacagtccaatgccaccagccatgaggatgacccatcttggctgaaaaataaagaccttaaatctaggaagcggaagatacaacccaggacagcaggaaggggagacccggtatgagaagaactgaggcccaacccagtttagagaggagactgaaggctaaaggaggaaggtttcccaggaaaaaaaaaattaggatttgaaagttgatgctatctttgataatttggaacaacgtaaataagtagaaatgg

SEQ ID NO: 3990 - DNA, 329 bp, Homo sapiens
ttactacaacacatccgggcacggtggctcacgcctgtaatcccagcactttgggaggccgaggcgggcggatcacgaggtcaggagatcgagaccatcctggctaacacggtgaagccctgtctctactaaaaatacaaaaaattaggcgggcatggtggcgggcgcctgtagtcccagctactcgggaggctgaggcaggagaatggcgtgaacccgggaggcggagcttgcagtgagccgagatcgcgccactgcactccagcctgggcgacagagcaagactccatctcaaaaaaaaaaaaaaaaaaaaaaaactacaacactat

SEQ ID NO: 3991 - DNA, 3065 bp, Homo sapiens
tgcttctaccgcgggtgtacacatggtttgccagggtgtgcgcgtcttcccaaggggtctggggaccaaattccagctcccgccatcgggaggcacggtaagagaccgtaggggacacaatcccgagcaccgcagatgccgaggtctccgctgcgctccagtctgtcaacagaggcttcaggaccgcggggtcccttcaaatgccccgccagtcccaggccaatcaccgcgcagcttcttccgggatcgtcgccaatcatcggccgttgcgtattgcgggtacagaggggtaagtgaagcttcgggcccttacatctttcttgaaggcaagaagcctctcctctacttcccagacaccccgcctcccccactagaaaaagcagccgaagcggctttatttaagggcaagtgggacgatgaggccagagaagtcagaaaggctccatatttgatatggtcaaataatggcgcccttaagagcagcctgtgacaattgaagggtggtcgccatattttcagaaggcaccttccgggtcccttaacccgggtgtctatgtccaagcggccatgaagtgaataaacactgaggaattatatttgtccctatcagaatcctcgaatccctagcagccagtccctgctacttcggttgcctcggctgcgttcggacgccacggctgggcggggccgcccttcctgtggacaacgacagctgaggccgggagcggggaggcggcggctccagggacctggcggccgccgatcggggctgcgaggccccatggcgccgcccccagccccgctcctggcgccgaggcccggggagacccggcctggttgcaggaagcccgggactgtgagcttcgcggacgtggccgtgtacttctccccggaggagtggggctgtctgcggcccgcgcagagggctctgtaccgggacgtgatgcaggagacctacggccacctgggcgcgctcggtgagagccccgggtccgagccccctcctccttcaccgggttcacaggggagatgatgtagaagggccgagaggactgtgagccctaatcccgcactcttgcaccaacaccagcagccacctcccgttcccagggcttcaggtaccccctcgggagtgttttcacccgcatccatttcattcaggcagcagcactgcagccccttccaggttgagtataagctccgagggggtgccctcagcctggaggggaatgccatcttcccacgatggcctctcaggcccgcgctgtgatccctgttctctcccaggattcccaggccccaaaccagccctcatctcttggatggaacaggagagtgaggcttggagccccgccgcccaggatcctgagaagggggaaagactgggaggagctcggagaggtgagggatagtcccgggtccccccacttggttttccagggcttcctgtctagcagagtttcttttcaggcccccacttccagcatccctaaagaaattcaactgtgttgggtactagaggagtaaagaaggcagacctggtacaaagttttcagaacatgggacagcggtcctgtgaggactgggagcccagtccaaccaggcactccagcctgggtgacagagtgagactccgtctcaaaaataaataaataaataaataaataaataaataaataaataaataatagcccctgcttcctgagcacttcctaagtgcttaacatgcatctactcagctaaaccagtaacgctgtgaagtcaaaagccattattattcccatttgatgcataaggaaccaaggctcagataaggcacttttaggagatctgaatcctgtttaccttgttctaaagcctgtgtgttaatcactggacagaacttccctcactgccttaagtgaaaagcattctataacctgagacagtctgtgcaaaagtgtttgtaagtgtaacttaattccggtttcccaggagatgtcccaaacaggaaggaagaggaaccggaggaagtcccaagagccaaagggcctagaaaggctcctgtgaaggagagtcctgaagtgctggtggaacgcaaccctgacccagctattagcgtggccccggcacgggcacagccacccaaaaatgctgcctgggacccgaccacaggagcacagcccccggcacccatacccagcatggatgctcaggccggccagcggcgccacgtgtgcacggactgcggccgccgcttcacctacccctcactgctggtcagccacaggcgcatgcactcgggggagcggcctttcccctgccccgagtgtggcatgcgcttcaagaggaagttcgcagtggaagcgcaccagtggatccaccgctcctgctccggggggcggcggggccggaggcctgggatccgggctgtgcctcgggcccccgtccgaggtgaccgggacccgcctgtgctcttccggcactacccagacatcttcgaggagtgcggctgagcggcaccgcaggctggagttgagcctgaccttggcacgaaggactgacggatccctgaggtgggccactgagtcggggactccggaactgaaattcatgccctgggctttcctcaaggatccctcaagtttccaacttgtaaaaagaaaagtgcctgtaaagattcgaatagattagacttgccacccatctccccagtcttttgtttaacaaaaaaaaaaaaaaaaaaaaaaaaaaagaagagagtgagaccctggactcatttcaaagtgttatctgaagatcaggtgcaacagagacctttatatcatctcaggaactagccactccttatctatttcagatgcagatgctgagggggaccagggcctggggaggggacctacatggagggcgtggtcaaaccctggctaattgtcatcagcaggggacccagacactggagtggatgggagtagaatagatgcaggtggcacaaatccagcctctgttgggagaccaaggagggaggatcgtttgagtccaggagttcagaccagcctgagcaacaggctatctagcgatatcta

SEQ ID NO: 3992 - DNA, 341 bp, Homo sapiens
agaagcctgagactagggaggagagggttgctccaaactggatcctacacaaccaggaggcagccctaggacttcagatcaaagcggatggactttggattacaggagaaatatttagtggtatctggaaaagaaatacattaaaaagaataaaataactttgaaattaaaaaatcccaacaatcttttgtttcacattttagctgcggatcagtatttagggtaaaggtgtaacttctcctgaaggtacatccttggctagaaatctaaaggccaggtcattactttggatctctgaacctgatttaggcatagtttcattcaagtttttctaggtcttt

SEQ ID NO: 3993 - DNA, 361 bp, Homo sapiens
catgagaagaaagaagaggccaggtgcggtggctcaaacctgtaattccagcactttgggaggccaaggcaggcagatcacttgaggtcaggagttcgagaccagcctgggcaaaaccccgtctctactaaaaatacaaaaattaacgggtatggtggtccatgcctgtaatactagctactcaagaggctgaggcatgagaatcacttgaaccgagaggcagagcctgcaatgagctgaggtcacaccactgcactacagcctgggtgacagagtgagactccatctcaacaacaacaacaacaacaacaacaacaaaagaagctgggaaatgtaatattgcactggatagccaaacaaa

SEQ ID NO: 3994 - DNA, 746 bp, Homo sapiens
ctgctccgcaccattgccttgctttagtcctgctacagcagtagacaaagcgagtctgctttgagctttatggttttttgccaaagtccatactagatggcgcatgctctccaaacttggctttgtccatcaaggttcaagaaaacaatggtcagacatgttcctcttaacaaacagtatgtccccaaacagcaaaaatgcatacagtcctttctgggtgaatttttaaatcttacataaatccatcaaccccatcctttttcctttgcctcttgggagaaattaatctagctttacattaattatgcatgttatcagatttcaagctccttgagagcaggtattttaattctataaagcctctacgtggccttggacatgggtaggtgcttaattacccaagatgctccttgaatacagatggtacacgacctacacagacttagatctttaccacttcccccctctccccaccctgacttgctcaatcctgaaggaactggagacgtctaagtgtctgaggttcacgcttccacacagaagcttgggtctgtgtgggagggaaaaaggaagccatctgtccgcaggccagaccaggccacaccctgctagcacccagaaccctttgtcccaggcccagccctgccattttactttccttgcatctggaaagcacagggaatatagtagtgacaaaagaaggaagggttgtttgagtttaagaatagtttactctaaaaaaaaaa

SEQ ID NO: 3995 - DNA, 302 bp, Homo sapiens
cagtcctggaaagacaagcatcatgcctctgaccagtgccttcagggctgtggacaacgaccctgggatcattgtctggagaatagaggtgagctgggctggaggcaccttacttgtgaccactggcatctggaagcagtctggctgcctggggctgctaggcaacagcccgccagcaccccttagcctatggtttgaggagaatgagaggcagcatcaaagtacctatttcccatccttcacctctcctgggtgctcaaagcaggtggttggcaggtggaggaaatgttcagccccgaaga

SEQ ID NO: 3996 - DNA, 190 bp, Homo sapiens
ggtgtgtgttagccggggtctccaaagaaccagagccagcaggggacacacccatctctgtatctggagaaaaagatcgatgagaaggaatctgctcctgtgatgatggaggctgacaagtcccgagagccacggttggcaccctggagacccctgagggtgataccaccactccaggctgaaagctggc

SEQ ID NO: 3997 - DNA, 619 bp, Homo sapiens
cctagtatttcctcagctgagtgcatggggccagaccacactggggagggcagtcagcgtcactcagagcaccgggtcatctcatgcagacacaccctcaaagaaatagcccaaattatgctgaccaaatatctgggcaccccgtgccccagacaagttgacacagaaaattaaccatcacaggttaactccatccaggagtggaattgctgggtcatagagaaggcataggaattcacagaaatcaccaaacggttttcaggcggttgtgccatgttaaactcccactggaaagagaggagagctgtgattgttccacgtcctcagcaacgtttagaataggcagtctttggccgggccgggcacagaggctcaaacctgtaaccccagcactttgggaggccatagtgggtggattacctgagatcaagagttcaagaccagcctggccaacatggttaaaccccgtctcttataaaaatgcaaaaattagccaggcgtggtggtgcgtgcctgttattccagctacttgggggctgaggcaggagaatcgtttgaacccaggaggcagagtttgcagcgagccgagatcgcgcctgtgcactccagcgtgggcaac

SEQ ID NO: 3998 - DNA, 390 bp, Homo sapiens
ggcttaggtggggatacgagagctgtcttcaaacatctgggagaatgtcctgtgttccctcaccgtctaaggctcagggacttcttccagaacaggatggagccctggacacacaactacacacacaaacaattgtcacagagtgggaggcaggataaagtggtgagtaacagcctggcctgagacacaggctcacgcatctgacactggctgagccgcgcactagctgagtggccttgggcatgttttgtaacctccttgactgttcccttatctgtgaaattgagataaatgtactacccacttcataaaaagatcaaatgtgataatacttgaaatatgtttagaacaaagttggccatattcaataaatgttagcttaaaaaaaaa

SEQ ID NO: 3999 - DNA, 9453 bp, Homo sapiens
ggcagccctctctgctgccattttcacttcagccccaaggtgatgttcacaaaggtactgaaggcccagctgtgggtgtacctacggcctgtaccccgcccagccacagtctacctgcagatcttgcgactaaaacccctaactggggaagggaccgcagggggagggggcggaggccggcgtcacatccgtatccgctcactgaagattgagctgcactcacgctcaggccattggcagagcatcgacttcaagcaagtgctacacagctggttccgccagccacagagcaactggggcatcgagatcaacgcctttgatcccagtggcacagacctggctgtcacctccctggggccgggagccgaggggctggtgagcagggggcctgaggtggtggatatgtgtaacctggccctgaggagatagggttacattggaaaaggtagacaaggaatgtgaaggaggttggggaccagcattacttctctggggtcagcagctgattctagaggaggaggtgaggagtggggtggcaactattacttctcaaggatccaaatcagacaacagctgaaaactggatttgaaggtaaaggtgtcagttaatggaagagctgtgagaacaaaaaaactggctgttgaggcgttgggccaaggggctgacagggatcaggttgccagaagagtaagaattagagatggtgagttgaaggagagctagctagctggcaagaaaagtgggcaaaagataaattctgggggtgggagcaatggaaaagctgagaagtcagcagtctctattctgatgcccctggcaggtgggaaaggaacagggaagaggaactgttcaggaccatatcacatttctttcccctctccctgaccctcagcatccattcatggagcttcgagtcctagagaacacaaaacgttcccggcggaacctgggtctggactgcgacgagcactcaagcgagtcccgctgctgccgatatcccctcacagtggactttgaggctttcggctgggactggatcatcgcacctaagcgctacaaggccaactactgctccggccagtgcgagtacatgttcatgcaaaaatatccgcatacccatttggtgcagcaggccaatccaagaggctctgctgggccctgttgtacccccaccaagatgtccccaatcaacatgctctacttcaatgacaagcagcagattatctacggcaagatccctggcatggtggtggatcgctgtggctgctcttaaggtgggggatagaggatgcctcccccacagaccctaccccaagacccctagccctgcccccatccccccaagccctagagctccctccactcttcccgcgaacatcacaccgttccccgaccaagccgtgtgcaatacaacagagggaggcaggtgggaattgagggtgaggggtttgggggaaaggggaagcaggggcatagtcagggtggggagtgtttgaagtttgcagatgagaaggtttgacaaaaagacagagagatgtagagacagtgatagagacagaggaacaaaaagagcagcagtgagaaggcaaagagagaggcagaagagacagacgaggcagagacaaaacactgagaaagagactgaaatggagtaataaatgaaagccccacaccaagcctcctttcttccactggcaaggtgaggggcttggtatagtttggggagatcccctgactattcagtaggagaagaaatcaaaaatccattcttttctccttctctccctccaacagtggccaggggaaggggaagtgagggcaggggcaaaaagatttgggaatttttatttatttatttattgtgacttttcatttttttggtatttggctttactggaataggagggcccctgcccactgtgccccgtttatcccttattccccaaaccctgctctccccaacacctactcacttaagcacttgtataaagcctccagggttgggaatgggagtaaagggcaagagggcggacacatgaagtttagtttctaacccatcatcaccctaactcaaccttttctgagccaaatggcttgaattgaagccagttgtcatggaaatagtaagaggttagggtttaagagctggggatgcgggggtgggagagagaaccctcaacatccaggatctatataatgagagctactttaaaccctcaggtccaccctcatgatgctgagttatttagccagagggtgcagcctgcttatgcccaaattccctcagccaagagagagaccaaagagcctctggaatggccctgctcccagcctctatcttcaggtcaattagagagagtatagagaccccagagtcccctgggtctggaaagcgttaggagaggtcaagaaaggagcagtaaggaggctgaaggttacagggcatttgaatccaaatcactgctctgggctagggaatagagccagcagaccaaggtgggaaggattctggaagggggacattttagtctcctaaccccaaagctcagggtggaagaggggagaacaaggaagcagagtgtataattattttttccttttatttttggaatctaacagtacctggcagcagggaggggaaagtacagtggggaaaagcatctgacaaggccagttagaacagaggatgggaaggatggagactcccgggcttggaaggctaggaagcaggcagagactggttgccatttcaagtcactagctaggcccattcattcctcccacaaccctgacccattctcctctggactcactgtgcctcagtttcttcccctcaatggaatgagaaatgacagcacccgccacagccaagagatgaattctgagcacttaccacgggcactttatggacataaaatacctctcgctgtgggacagataaccagggcaccagagtagtggtgaagagatgtgaggcttaagaggagtcacaggcttcagagtacaagttcccctctgcctcccagctggacagtgcctagaagccaaggagttgagaatctcctgatccacaccctatccttacttcaccaccaggcctcttggctccaggcaagagcttagaggatgtcaggagaggtgggggtaagaatcttcagcaaaactgtcactctaagtagagccagcagttacgggtctgataaaaacagtactgaactaaagtaaagcccaagctggtgagcaaaactggatggctcattcttcccaagagcatgactctcccccttggccagttggtggaaggggcaaaggtatgtgaccacccttgagaaggtgatgttggtgagctttaacatcttattcctattcttatagtgagaaagtgaaacaagatctttcagtagaggaatgggcagggctgttaggctcttcagcttgccttcacccatatagcagctatgctaaccccaagcctctctggccctgttcttcatccttccttctgccccaatcctgaaggacaagacacacccggccatcaacaccactcacatttccttggtggaaggaaaggaacagagaagtgaagaacagatacctccctccaaggtcaaatgcctcgtgatcttggcagagtagggattgggcaataagcatcaggtatcttccctctacagattctagagagctggggcattaaatatgggggacacttagaatacagctccttaaataccaccaaataaagacctttgtgtgtgtgtggtgggtggggggggggcaggggtctttctcttatgaacataaatctgtgagctgaagtctcattcccctgttcctccctacccccaaagaggcacagagtgaagggacttggggggcacagctcagcaacccagtgggagttagcaccccctcccaccttatgatgtgtgtggacctggccagtgcccctctgaacatatcattattagtgtaattatcatttattttgtgtatttgtcacattgtgtgcatgacagcctttgttaagggtgtctgaggagtatggagctgacaggggcattggaatgccaggaaagaacttcttcaactgagatcaaggcttcctggagggaaccactgcaaaaaggccatcaggcagttttcaagttatgtgacagagggcaaagacggccatagggtgctctgagttttgggatggtcacatgacacaatccagcacttgaacctgaaaaaaaaaataaaagcggtcaaagagtttagaattcagtgctgagctcttctccctaatcaagtgccacatttacaccttggagaaccggaggtgaagaggatctgagacaggaaacctcgtgttcaatgactaagaagatggggtcctggagcaagacagaaaacactaagggcatggtggtataaggtttgggacatgcaggccaaggaaggatggaaagaggacaggaaactgggggtacctagaacaacccctctctgaaaagcttgagccaaaacagtcccaaagacaacaagacccctctcccagcctccacagaatggaagatctaaaggttctcttgagatgatccagctagtatggaagatctaaaggttctcttgagatgatccagctagtgtcctattctcctgcagtccctgttcctaggtttcctcaacgaagtttgacaaaaatctaaaccaacatagccaacgaacttgccttgttacacaagagtggctaaaatagcatctcaaatattctttcagttcactgtaaaaatttttcccatgtacctagagcacaattccccaggaatatgagttgggaatggcaaaagaatattgcctgactcacatttttcaaaaataaggaaagctggctgggcgcagtggcttacatctgtaatcccagcactttggggggccgaggcgggcggatcatgcaaggtccggagttcgagaccatgctggccaacattgtgaaacctcatctctactaaaatacccaaaattagccgggcgtggtggcgtgcgcctgtaatcccagctacatggaaggctgaggcagaagaatcgcttgaacccaggtggcggaggttgcagtgagctgagatcgcaccactgcactctagcatggtgacagagtgagactcccatctccaaaaaaaaaaaaaaaaaaaaaaaaaggaaagcaggacccagtggtgtgctcctgtagttccagctattcaggaggctgtggcaggaggaccacttgaggccagagggtcaaggctgcagtgtgctataattgggcctgtaaatagccactgtactccaagctgagcaacacagtaagacactgtctctaaaaataattaaagtaaaataaaaataaggaaagctcctgtgacatcaacctgatccagaattggggacagcgctactgcgggttcaatgtactgccatgttttccctgtcttatcagttctatcagcacactgaccccactcgagaccaactacaagactaaggctggaagtggttgagtagcagaagtgttatgtattctatcttcccaagggaaccatatccacatctacccctaactttggcctgagctgaaaatgggttttctctccctgtggctcatttgtttcctatattgagagaacacccaaaaaaagactactcaagatgactttttacaagtcttttctttatcctaaaacatcctccaaccgaaggcatgggaagctatcctatactctgaccttgcctatattttaaatggcaggggccccaagctaagaatcagcaggcagtggcatctacagcttctggtctgtagtggcgtagaagcaggaaaatcaatgctccaaagcaacaatgtccagctttcctgccagtgagctgggcttgagggagtgaatgggactctttctgccttttctttttctcaaaatacgactgcattaactgggtgtatgcacacacaaacatgttcaaactagggcactcatacctagctagaacctactcagggaaagaaatatgtatttccacagtaccctgatcacccagtaaaagctaatatttattgaataattactatgcaaattatggtaagcaaattgtagtgtgaatacatgatatgagaatatcacttaattcacacagcaaccttcacaatggggttccttttggtacagtctgaaaagagaatgattatctgcgcagggtctcagagctagtgtggtagaataagaaattaaacctaagtagttgctaaacaatattacattctaatctatcctattgaaagtgatccgggaggtagaaacctaaatacaggaataacataagggaaagagataacaagaaagttagggacaccttggactcaaagaatctggaaagatgtgaaacctgtaattttaaatccctttggaagggaaaaacaagaaaagtctagatatggcaagagaaggggaggttaaattttggggggattccaataatcagaaataagtggcattgccagaggccctcatataagagaacagcaaaaaagttatcctcccttaagttcctccctcactcctcatatcagacacagcaagagaactcagctcaacaccaagaagtcctgcccttattcacaccttccttcctatagccctcatcctcacagaagcttctagcctctatcttcagcagttcttaagaggtggggtggggggctgggcagtttagagtgagagtggaaaaaaagaataatcctagagaaccataaaaaagtacagatttacagctgaggaagctagttctccccacagcttttatagactccctcattaagagcttccaggtatgcagagaatgtcacagcttcaggaattggaatcagttaaccacatctggatgctggatcaactatagtagggaaacggggagaggaaggaagggtactaagatctcaggtaaacaattacaagcctcaatgtctgttccatctccaaacggaattactattttaaaactgaattgggaaaaaggcatcctgaactattcatgctcaaagagtatgtggagaatgactataatgagataggaaggggaggacttcatctggcttggaggttagagacttctgaccaacataggaacagctgctgaaatgggatgaaagaggttaataagaaaaaaaaaaaaatcctcacaaattggaaaacactgttcaaagatctaggggaagtaagatgagtgaggagaataattaggcttcaagaagagaatcctggcaagtaaggctgaatatctttctggaaggttatagaggataaagagacgaagaaaacttccaaaagatccactgttccacttcataatcagcatctgctctattccctcatgtatttttctctttttaaaaccatattcaggaagaaaccattagtgaatctataatctctcaagttacaaatcagatctattctgttttcagatgaaggcagagtagagagaggaaaagctagccccaagatcagagcctgaggtaaagaaaaggaaggcagacagaaaagagggaaaagggaaggtcattccaattttaaggtttatttggttgaagaggtgtcaaaaatttaaccagcattcccttttgttcacttctccaaagtctcagaatggggcaaacttcacaacaaatgggcagcagtttttggatctgctctccaaggcacaatttttctaaattatctaaactttaggtccctgctttcctcaccaaccagagactttggagaaataaagagatatcttgacattagaaaggtgatcaaactattaccatttcattaagcacaaaaccaggcaggttttagtagaaataaggataaaggattacaccacagcaacatgggacctgatcatagtaccaaagtcttcaggtaaggtgtcaggctcctaagtcttattaccaaaaatagctcaaacaaaaaccgagcttatataaagattaagaggagaaattctgcaataacatatccaaaaagattaagcaggtttcagatctacatgaacttgaagcctccagttccactgcttatgttcccaatgatttagctaacaatgcgtaacagctctgacatcctctgtcatgctttgattctgcatacaaaatttcttctgtctctgagggatatccagcccatctcccttcctgaactgactgaccaacatagtatcgtatcacatcacccttgaaatcagggcccttttcctttaatgtgggaccctggactccattttatccaagaaaaagtctgcattattagctaataacagaaggctactaatcactgcccttgtatttatatcctttgcaacacctaaaacctcccatgttctgttttatttcagtgggtcactacaagctgctggagcaaagacttggtgggtgggtaacttaacctcttcacagaggataaaaaatgcttgtgagtatgacagaagggaataaacaggcttaaagggtaaactcagtccttttccttgtcttctcttctaagggataaaggtattatggccaattctctataatatttgcccctgaagctccccttatctggtctaatctagctccaataaatcaaaggagcacctaataaaacacattgttctcttttctatttttttttattaacaagcaacataatcaaaaacaaaaacacaacaaccttaaagctgaaacagcaataagtcaaactgctgccgcagttcatggatgtacctggggtacatgctccctcattgcgaggcaggacgtaggcacatgactgtgcatttaggcatatatgtgaccaagaagaaggagagaaatggaaaacactggagaacagaaagtatcaggaacttttcatcaggcaatcccaaagcgctctgctcttttcctcttctttgcctgtaaagaagaagcaagaagaaaaaaattagactgaagacaatagttgcctgggttcctggctgctttaatccaaactcacatgaactgtcacaaggcccgagaaggaaggatggcccagacttgagcttggtagctagagatttcattcctgaatctctccaatccttccagttatccagtaggagctggaaagtttaatgggtaaggagggtgaggagtaaagaagattactgggggtgagggacagagagaagaacagtggtagaaaatgggaagattcctgaagcaaagagagccactcagcctgagatcaagctagcctggaaacaatgggctcttaacaggctgggaaaagtcttccagtcaatggggagacggaagatttcagaggataaaggattaaccaatgctattcatagaggtgaaggagatgcccttctgagcagtcaggcccagacagtagctattccttaggactccaacccacaaaaaaggcatataaatc

SEQ ID NO: 4000 - DNA, 5469 bp, Homo sapiens
attttgtgtatttgtcacattgtgtgcatgacagcctttgttaagggtgtctgaggagtatggagctgacaggggcattggaatgccaggaaagaacttcttcaactgagatcaaggcttcctggagggaaccactgcaaaaaggccatcaggcagttttcaagttatgtgacagagggcaaagacggccatagggtgctctgagttttgggatggtcacatgacacaatccagcacttgaacctgaaaaaaaaaataaaagcggtcaaagagtttagaattcagtgctgagctcttctccctaatcaagtgccacatttacaccttggagaaccggaggtgaagaggatctgagacaggaaacctcgtgttcaatgactaagaagatggggtcctggagcaagacagaaaacactaagggcatggtggtataaggtttgggacatgcaggccaaggaaggatggaaagaggacaggaaactgggggtacctagaacaacccctctctgaaaagcttgagccaaaacagtcccaaagacaacaagacccctctcccagcctccacagaatggaagatctaaaggttctcttgagatgatccagctagtatggaagatctaaaggttctcttgagatgatccagctagtgtcctattctcctgcagtccctgttcctaggtttcctcaacgaagtttgacaaaaatctaaaccaacatagccaacgaacttgccttgttacacaagagtggctaaaatagcatctcaaatattctttcagttcactgtaaaaatttttcccatgtacctagagcacaattccccaggaatatgagttgggaatggcaaaagaatattgcctgactcacatttttcaaaaataaggaaagctggctgggcgcagtggcttacatctgtaatcccagcactttggggggccgaggtgggcggatcatgcaaggtccggagttcgagaccatgctggccaacattgtgaaacctcatctctactaaaatacccaaaattagccgggcgtggtggcgtgcgcctgtaatcccagctacatggaaggctgaggcagaagaatcgcttgaacccaggtggcggaggttgcagtgagctgagatcgcaccactgcactctagcatggtgacagagtgagactcccatctccaaaaaaaaaaaaaaaaaaaaaaaaaaggaaagcaggacccagtggtgtgctcctgtagttccagctattcaggaggctgtggcaggaggaccacttgaggccagagggtcaaggctgcagtgtgctataattgggcctgtaaatagccactgtactccaagctgagcaacacagtaagacactgtctctaaaaataattaaagtaaaataaaaataaggaaagctcctgtgacatcaacctgatccagaattggggacagcgctactgcgggttcaatgtactgccatgttttccctgtcttatcagttctatcagcacactgaccccactcgagaccaactacaagactaaggctggaagtggttgagtagcagaagtgttatgtattctatcttcccaagggaaccatatccacatctacccctaactttggcctgagctgaaaatgggttttctctccctgtggctcatttgtttcctatattgagagaacacccaaaaaaagactactcaagatgactttttacaagtcttttctttatcctaaaacatcctccaaccgaaggcatgggaagctatcctatactctgaccttgcctatattttaaatggcaggggccccaagctaagaatcagcaggcagtggcatctacagcttctggtctgtagtggcgtagaagcaggaaaatcaatgctccaaagcaacaatgtccagctttcctgccagtgagctggggttgagggagtgaatgggactctttctgccttttctttttctcaaaatacgactgcattaactgggtgtatgcacacacaaacatgttcaaactagggcactcatacctagctagaacctactcagggaaagaaatatgtatttccacagtaccctgatcacccagtaaaagctaatatttattgaataattactatgcaaattatggtaagcaaattgtagtgtgaatacatgatatgagaatatcacttaattcacacagcaaccttcacaatggggttccttttggtacagtctgaaaagagaatgattatctgcgcagggtctcagagctagtgtggtagaataagaaattaaacctaagtagttgctaaacaatattacattctaatctatcctattgaaagtgatccgggaggtagaaacctaaatacaggaataacataagggaaagagataacaagaaagttagggacaccttggactcaaagaatctggaaagatgtgaaacctgtaattttaaatccctttggaagggaaaaacaagaaaagtctagatatggcaagagaaggggaggttaaattttggggggattccaataatcagaaataagtggcattgccagaggccctcatataagagaacagcaaaaaagttatcctcccttaagttcctccctcactcctcatatcagacacagcaagagaactcagctcaacaccaagaagtcctgcccttattcacaccttccttcctatagccctcatcctcacagaagcttctagcctctatcttcagcagttcttaagaggtggggtggggggctgggcagtttagagtgagagtggaaaaaaagaataatcctagagaaccataaaaaagtacagatttacagctgaggaagctagttctccccacagcttttatagactccctcattaagagcttccaggtatgcagagaatgtcacagcttcaggaattggaatcagttaaccacatctggatgctggatcaactatagtagggaaacggggagaggaaggaagggtactaagatctcaggtaaacaattacaagcctcaatgtctgttccatctccaaacggaattactattttaaaactgaattgggaaaaaggcatcctgaactattcatgctcaaagagtatgtggagaatgactataatgagataggaaggggaggacttcatctggcttggaggttagagacttctgaccaacataggaacagctgctgaaatgggatgaaagaggttaataagaaaaaaaaaaaatcctcacaaattggaaaacactgttcaaagatctaggggaagtaagatgagtgaggagaataattaggcttcaagaagagaatcctggcaagtaaggctgaatatctttctggaaggttatagaggataaagagacaaagtgaagaaaacttccaaaagatccactgttccacttcataatcagcatctgctctattccctcatgtatttttctctttttaaaaccatattcaggaagaaaccattagtgaatctataatctctcaagttacaaatcagatctattctgttttcagatgaaggcagagtagagagaggaaaagctagccccaagatcagagcctgaggtaaagaaaaggaaggcagacagaaaagagggaaaagggaaggtcattccaattttaaggtttatttggttgaagaggtgtcaaaaatttaaccagcattcccttttgttcacttctccaaagtctcagaatggggcaaacttcacaacaaatgggcagcagtttttggatctgctctccaaggcacaatttttctaaattatctaaactttaggtccctgctttcctcaccaaccagagactttggagaaataaagagatatcttgacattagaaaggtgatcaaactattaccatttcattaagcacaaaaccaggcaggttttagtagaaataaggataaaggattacaccacagcaacatgggacctgatcatagtaccaaagtcttcaggtaaggtgtcaggctcctaagtcttattaccaaaaatagctcaaacaaaaaccgagcttatataaagattaagaggagaaattctgcaataacatatccaaaaagattaagcaggtttcagatctacatgaacttgaagcctccagttccactgcttatgttcccaatgatttagctaacaatgcgtaacagctctgacatcctctgtcatgctttgattctgcatacaaaatttcttctgtctctgagggatatccagcccatctcccttcctgaactgactgaccaacatagtatcgtatcacatcacccttgaaatcagggcccttttcctttaatgtgggaccctggactccattttatccaagaaaaagtctgcattattagctaataacagaaggctactaatcactgcccttgtattcatatcctttgcaacacctaaaacctcccatgttctgttttatttcagtgggtcactacaagctgctggagcaaagacttggtgggtgggtaacttaacctcttcacagaggataaaaaatgcttgtgagtatgacagaagggaataaacaggcttaaagggtaaactcagtccttttccttgtcttctcttctaagggataaaggtattatggccaattctctataatatttgcccctgaagctccccttatctggtctaatctagctccaataaatcaaaggagcacctaataaaacacattgttctcttttctatttttttttattaacaagcaacataatcaaaaacaaaaacacaacaaccttaaagctgaaacagcaataagtcaaactgctgccgcagttcatggatgtacctggggtacatgctccctcattgcgaggcaggacgtaggcacatgactgtgcatttaggcatatatgtgaccaagaagaaggagagaaatggaaaacactggagaacagaaagtatcaggaacttttcatcaggcaatcccaaagcgctctgctcttttcctcttctttgcctgtaaagaagaagcaagaagaaaaaaattagactgaagacaatagttgcctgggttcctggctgctttaatccaaactcacatgaactgtcacaaggcccgagaaggaaggatggcccagacttgagcttggtagctagagatttcattcctgaatctctccaatccttccagttatccagtaggagctggaaagtttaatgggtaaggagggtgaggagtaaagaagattactgggggtgagggacagagagaagaacagtggtagaaaatgggaagattcctgaagcaaagagagccactcagcctgagatcaagctagcctggaaacaatgggctcttaacaggctgggaaaagtcttccagtcaatggggagacggaagatttcagaggataaaggattaaccaatgctattcatagaggtgaaggagatgcccttctgagcagtcaggcccagacagtagctattccttaggactccaacccacaaaaaaggcatataaatc

SEQ ID NO: 4001 - DNA, 646 bp, Homo sapiens
agctgacaggacaccctaagtccatcctgattttgcagaactcaagacatggggaggatacttaaaggcctagacttcctaaccctgcttatatggctctggaagctcattcctgattcttcctatctagagtcaggatagacatattctgtccaatggagacatgttgtaggacactcccaactgacttaggaaaggcagtgaagaggagctggaatggaggcagaggcagatatttattgagaatcatctattagacccaagaaggatcaatttaaggtccagagcaaggggaaatgggtcaaaatgtaaagttgggatgttcaaactttgtaaagacctactggcactagactgagaagtcaaaggaagctcaggggagaaaaaaggcattgtagttaatctggtgtatttaatattatttctggtgctttaggcaaataggaggcaacaccatggaggtaattattcctttcctcaagagctgggggcagtcatggtgatgatgatggagcagcagctgaagaaacttcttaagagagaatggggagacagatgtataggaagtgcttggatagttccattttgctgggtgttattcctaatgggagtgaggcaagaagcctagatctgaattctggtttac

SEQ ID NO: 4002 - DNA, 428 bp, Homo sapiens
tctactaaaaacacaaaaattagccgggtgtggtggcacacgcctgtaatcccaggtactcaggaggctgaagcacaataatcacttgaacccgggaggcggaggttgcagtgagctgagatcgcaccactgcactccagcctggacgacagagcgagactccatctcaaaaaaaaaaagaagcttttcataaagcatcatcctgttggtactgtcctcaagatagtaagttcttgccagatatggctgtttaaggccttccaccatgattgtaagcttcctgagcctccccagaagccaagcagatgccagcaccatgcttcccataaagcctgcagaaatgtaagccaattaagcctcttttcttcataagttacctagtctcatgtatttctcctttacagcaatgcaagaacagcctaatatac

SEQ ID NO: 4003 - DNA, 245 bp, Homo sapiens
taagtctcccggccaagtaggaaacagttttcaggaaaataaatggagcctctcttcttgcggagaggcaagactagaccactatcttgttaaactaccattataaacttttttccattcaatttagcactagcagtacttcagcaagttcaaatcacagaggagataagacttttgaaacccagacattatataagcacaaaccctgaggccaagccctcccccaacgtatgtccacttggaat

SEQ ID NO: 4004 - DNA, 560 bp, Homo sapiens
ggaattattctcacacttctgacatgagggggtgcttcatgatgactcttgaatattgacatttcaagtttctaaggacagttctgctgtccctcaggcaggttgggagccattgtttaagagccagacacagcaaagttaaatttgctttaatggtttaatttagggagaaataattttcacgttgctcattgagctttcaactctgagtttgtcttcctattttgaattgtttttctttacctgtttctttttgcaaaaaaaggggacagggtaatttactctgtggcatatttagcacgcctgagggaatgaatgtgggctgctgtcagaatgtttgttgtacagagagttaaggtggtattgaggagggagattgtaggagttggagtggtgagggaaggccttacagaaaatgcagactatgaagtgggcctcagggaggttagaaaactggaaaggcccagaatgtgcagataagggcaaagaagggccttggaggcaggagagggaggactgcccaagctgtaacacaggaataagcatttcaagtgtagggg

SEQ ID NO: 4005 - DNA, 455 bp, Homo sapiens
gtaacctttcctttcttccaataggtcactgctgtctgttctgacttattgctaattctttgctcttccttttctgacctctctagagcctagaagaggagataacatcaattttgtttagtgaaaagggcttttctgatagcatgaaagccaccttcacttcagccaccacttggacagcagagggcgctgttgtgagcgctaatgcaccttctgaaaagctttcttcctcgcccttctcacacttgcttgaggtgcattttactttgtttcccctgttactaaaagccacatatgagagagattttcatttttttaaatattcaggcaccattccctccagtgctttcattggtgaaattaattcttcctgggagaaacattcaagaaacaatgactgaattggaacatgaagaaaagatatagattggatgtttctcctgcttctttggtca

SEQ ID NO: 4006 - DNA, 130 bp, Homo sapiens
gctgcacgcctataatcccagctactggggaggctgaggcaggaaaatcacttaaacctgggaggtagaggttgcagtgagccgagatcgcggcacactgcactccagcctgagtgacagagcgagactc

SEQ ID NO: 4007 - DNA, 1786 bp, Homo sapiens
caggaaaattgaagtgcgaatttgagtgaccgtctgtacgtccaaaatggaaaatggcattcatcagactacttctttctcttatttcatgtgtaactccttaacagaaaacaactgctgcacacggagggccttatcagacacaggacagggaccacagtattagcactcaagtgctcatagcctttcccccaccaagcccatccattctgtgcactgttggccccaggggagacaaggtaattttctcccttcctggtcatcttggggcccagaccaccagctggagaaatgatgcagagagagcaggtaggagctcccttccaggtgggaaacgcaaggcaggcagcctcctctgacgatgctgccgtggctggactgaaattgtgctcacttccactcaagtgagcaaagcacatctgtgttgcttattttctactattgatctttccttccttagtctcccaccccatcagcgccactgtacagcaagggaggggaaaaggacttttaaacgtgtctattcacaggaaagcagtgtcctaaggcttctgactgcctccttcctcactgcaactgtcatttcaagcgtatgctccttctccagcctctcctgccacaagagcacccagtgggtgggatacacatggagttaccatgtccccaggtgggcaagggagacacaggtctcaggtctgtgtgcagccagtgtaggccctgctgtttgggctcctgctggcctctgcagcaatgcagtcctctctgccaggccctgctcacctctgctcctgaaccctgcacccggcatctcaaggtccatgttgtctctgtcatgcgtagcatctttctcagctgctgacgtggccttgctttggatctctcatctattctgcagcccttagataggattaccatgccccctttgacaaggcccctgggtgtttaccctcacctagtgattctgatctcagcccgtccgtctctcctctggtacacgggaactccaaaataccttccaagatactcaaggtcaaaatagactcatggtcaataaattctgagcctcgtctgtctacatacacccacctaccatactatttattctgatgtggctgtaggatgcttctggcaggaccccatgcaagatggtgtcagtctaggcccaccgggtgaagaaaaaagggcctgttgacttttagctttgctgccatcccattcaatgccaccctctctttcaaaagtctgcgctcagagtgagattaatgcagcaaacagggttcggttgctgccttttagaaaggcttgcccacaatccacaagccagacagagccacttccacagggtcatgctcctccttcccaaaggggcttctgccttgtcctcttttcccgaatcataaggactattggagcaaaatgagagagccagcttgcaggtaagagaaaatccaaaatattattctaatgatactttctcccctcaagccttctactaaataataataatgacatacagttgtggtcattgttaaagaaaaaggaaacacagcaatccatctcaaacaaacactgaatttaagtaatcaatgactataataagaaagggatgatttaggggaaattcttatagtgacaaaatgttagaactagaagttccagaatcatataaaacatttaggacctttctattttgtagatgagaaagctgaaatactgcaagttgaaatgactcgtcctagatcccaggtctagtgaagagtgagcaccagaaatcacatgtactaga

SEQ ID NO: 4008 - DNA, 691 bp, Homo sapiens
acatttactgtactacagggaatctctcatttcaaaatgacctgtgttgcagttattgtttataaaactgttcatttatctgacataaggggctaatcaaactgcttaagtacattcctggatgtttggaagatttttaagcgccatagagagggtacttatgctatggaaattgtgtttatatatatatgcataattgccactgaaattctgaacagacccaaaggaagaaaaatactgtgatttaaataaagctaacataattaatttatatctattttatatttgacttagtgggataaattgttttgtggaaaaccatattataaaatagtctaagttttttatagttgaggaagaatttgaggtgaaagatcatgttaattgtaacaattgccagtactttgtgttcactatgtgtctggcactgatttatgtttattaatttactacatcctcagaacaattcagtgaagtaggtattactaatattcttactttgagattatgaaaccgaggctcaggtagtttaaataaatttgccatgtcacacgcagtggctcatgcctgttataaccaacactttgggatgctgaggcaggaggattgcttgaggccaggagttggagcccactctggggaaaacatgttgagatcttgcctctgcaaaaataaagtaaaataaaattta

SEQ ID NO: 4009 - DNA, 691 bp, Homo sapiens; identical to SEQ ID NO: 4008

SEQ ID NO: 4010 - DNA, 691 bp, Homo sapiens; identical to SEQ ID NO: 4008

SEQ ID NO: 4011 - DNA, 423 bp, Homo sapiens
aacatttttggttgatgacttgggggtcagggaatccattcaggtgagaggttagttttttggtcttcaaattggaagagcaactttagcctttgatttgtattatcttctcacagcaactattatgttgactgcctgtacatgccttcaataccatgtaaacctagtttatcttttgtatatttgatttcttagatggttagagctgcctgtaatcccagcactttgggaggccgaggtgggcagacctcatgatctactaaataagagaaattttctcttattaataagaaaaacccatctctactaaaataagaaaaaatagctgggcatggtggtgcacgccagtagttccagctactcgggaggccaaggaaggggaatcgcttgaacccgagaggcggaggttgcagtgaactgaga

SEQ ID NO: 4012 - DNA, 423 bp, Homo sapiens; identical to SEQ ID NO: 4011

SEQ ID NO: 4013 - DNA, 423 bp, Homo sapiens; identical to SEQ ID NO: 4011

SEQ ID NO: 4014 - DNA, 100 bp, Homo sapiens
tgcctgtaatcctagctactcaggaggctgaggcaggagaattgcttgaacctgggaggcagaggttgcagtgagctgagattgtgccactgtactccag

SEQ ID NO: 4015 - DNA, 2004 bp, Homo sapiens
ttttttgagacggagtcttactcttgtcacccaggctggagtgcaatggtgcacagcacaatctccacctcccaggttcaagcgattttcctgcctcagcctcccgagtagctgggattataggcatgcaccaactcgccaggctaatttttgtatttttagcagagatggggtttctccacgttggtcaggctggtctcaaactcctgacctcaggtgatcctcctgcctcggcctcccaaagtgctgagattacaggcgtgagataccgcgcccggcccagatttcattttaatagcctatgatttaggtaggggtaggaaaagaaagagggaggcaagttaagaaaacttccttagttgtactctctaccatggtaagcataagtagcctttaaattaaaaacatagattacttttaaaataatgccatgttttaatgtaattaaaatactcctgcatgaattcaagaaaagcttgatggcttcagtaaacattaaaatatagttcagtgtggcaaagatgaacatttgtgtctgtgtttgcagctccattcctcagaggctcttaaacatgtccagaacataatggaccatttgtaggtggtgaaatagaggcaacagagaaaataatttatctgcacactgtcaaataaaaaataaatgacgtaatttattcaataattcagaatgctttctagctaagtattttaaaaaatggtaaactaacaaaaaacccattccctcaactaccataatccagtctttcaactcacttaagcctcccacacaattttagtgtgacagcagaaaagtaggatagcaggaatacattcttttgtcctttgtatttctcctacagagtagcacaatcagtaactatatatacacacagaggggagaaaaatattatttctttttgacatataacaatagattatttcttactataaaagtgaattctaatctaaagacaacgagcacaatggtctaatgatgggacgcaagtctttaaaacttcaaatttatttaacaagcatttaagttacccgatgggtaactctagattgttacaattaatataaaaccattaatgataactaacattcactggacatacaactgccaggcaagcatggttctaagtgctttatgtgtatgaactcatttaatcctctctacaatgccataaggtgggctactattattactctcacttacttgaggcacagagttaaagaacttgctcaaggtcaaaactggtgagcaatggggccaggacttcaactagacagcccggcctcagtgtccaggcccttcaccaacacaccacactgcctcttcctgtccctacggctttttaaactggcgaagtaggatccgactgactatactgctcaacttgtaagggtagcacagatccttttttatggatttactggtaatagtttttcttgggtaacctgtagcctatgaaagttcctgtttcacttcaactccctcaaattctcctattaaaagttattaattgtagatctggcctatgtatcctctaaaatgggtgggttaaggcatcaatttgacattctattaccacttcaaacaactattttgaagccctcagtctttaacgatccacggatgccccaccacaacagaactctttacaacatggttatttcatataacacaagtctgtttttactcgtaataagcggttactacatatacccaacgggcctccttttaacatgctttcacagcatggatcccaatgatggcattataatcacactgtattgtaaaatccggaatttaacaatagcataccttatatttgtaaagcactcaacaagttacaaagcaccttcttacacattatctcacttgatccccacaacatccctgtaagaagaggcagggattagaatctccattttgcagatgaggaaacaaagtgaggttaaatatcttgctataagcaaaagggcgatcatggctcttct

SEQ ID NO: 4016 - DNA, 2004 bp, Homo sapiens
ttttttgagacggagtcttactcttgtcacccaggctggagtgcaatggtgcacagcacaatctccacctcccaggttcaagcgattgtcctgcctcagcctcccgagtagctgggattacaggcatgcaccaactcgccaggctaatttttgtatttttagtagagatggggtttctccacattggtcaggctggtctcaaactcctgacctcaggtgatcctcctgcctcggcctcccaaagtgctgagattacaggcgtgagataccacgcccggcccagatttcattttaatagcctatgatttaggtaggggtaggaaaagaaagagggaggcaagttaagaaaacttccttagttgtactctctaccatggtaagcataagtagcctttaaattaaaaacatagattacttttaaaataatgccatgttttaatgtaattaaaatactcctgcatgaattcaagaaaagcttgatggcttcagtaaacattaaaatatagttcagtgtggcaaagatgaacatttgtgtctgtgtttgcagctccattcctcagaggctcttaaacatgtccagaacataatggaccatttgtaggtggtgaaatagaggcaacagagaaaataatttatcttcaaactgtcaaataaaaaataaatgacgtaatttattcaataattcagaatgctttctagctaagtattttaaaaaatggtaaactaacaaaaaacccattccctcaactaccataatccagtctttcaactcacttaagcctcccacacaattttagtgtgacagcagaaaagtaggatagcaggaatacattcttttgtcctttgtatttctcctacagagtagcacaatcagtaactatatatacacacagaggggagaaaaatattatttctttttgacatataacaatagattatttcttactataaaagtgaattctaatctaaagacaacgagcacaatggtctaatgatgggacgcaagtctttaaaacttcaaatttatttaacaagcatttaagttacccgatgggtaactctagattgttacaattaatataaaaccattaatgataactaacattcactggacatacaactgccaggcaagcatggttctaagtgctttatgtgtatgaactcatttaatcctctctacaatgccataaggtgggctactattattactctcacttacttgaggcacagagttaaagaacttgctcaaggtcaaaactggtgagcaatggggccaggacttcaactagacagcccggcctcagtgtccaggcccttcaccaacacaccacactgcctcttcctgtccctacggctttttaaactggcgaagtaggatccgactgactatactgctcaacttgtaagggtagcacagatccttttttatggatttactggtaatagtttttcttgggtaacctgtagcctatgaaagttcctgtttcacttcaactccctcaaattctcctattaaaagttattaattgtagatctggcctatgtatcctctaaaatgggtgggttaaggcatcaatttgacattctattaccacttcaaacaactattttgaagccctcagtctttaacgatccacggatgccccaccacaacagaactctttacaacatggttatttcatataacacaagtctgtttttactcgtaataagcggttactacatatacccaacgggcctccttttaacatgctttcacagcatggatcccaatgatggcattataatcacactgtattgtaaaatccggaatttaacaatagcataccttatatttgtaaagcactcaacaagttacaaagcaccttcttacacattatctcacttgatccccacaacatccctgtaagaagaggcagggattagaatctccattttgcagatgaggaaacaaagtgaggttaaatatcttgctataagcaaaagggcgatcatggctcttct

SEQ ID NO: 4017 - DNA, 696 bp, Homo sapiens
ccctttcatgaaacactggagcagcggcgctctgttcttgtgttattttgtgctgggccccaattccccttccactcttcaaatcatctaggacagaactgatgtctgatttatgctttccccctgtagatcttggcatcattcatgtctattatttattaaatggatactgagaaaatatccatctcatttttaaaaagtaatgacatgaaagattcacatacactgtgagtcagtgaagagctcaggggagaagcagatttataaaggataaagttaatgcgtgctggagtgaggcgactgcccaataataatgtaacaaccttaggatatgtaacaggaaggaatttttatgaaattcatttccagaattcaaagaagacagtttgtagactgagtaaaaattataagcttcagtggttaacagtgtagctttctaaactggtttctgttacagtatatttacttgaagcaattgggggggtactttcttaaaacagtgttttgccttctcttaaaacactattccttctagactgtgtttttgctgctgaatttaaggtgactttcatttttctaaaaaagttacaccaaaagcacactgcaccttcttcattaaggtgaaatcatatgcctttagcttgaggacagtctctttgaaactgcttaaaaaaaaaaaaaaaagaaaaatgcagg

SEQ ID NO: 4018 - DNA, 430 bp, Homo sapiens
ttaggcaacaacctcatttctccttgtaacattcttgtttataaatggagaaactgaagcaaaaggctgttaagttaaatgctcaagacctaagtgctagtcaatagcagaggcaggaacagaaactcaactcatagtgctcattcagctcaaaaattcttagagggcaaggattaattattttcacaaatatttatcaagtgcttattctggattagacaccatgtgaggtgaaaaatagagatggctgctgcctgaagaagccttccatctaatgagggaggaagagaatagccaagcaagcaaacaattttagatggcgataccttccaaggaaacaagcagggtacagcagcaataggataaggaggcagaggagcatatatttacacaggtggtttgggaaggcctctctgagtaggtgactttt

SEQ ID NO: 4019 - DNA, 696 bp, Homo sapiens
ccctttcatgaaacactggagcagcggtgctctgttcttgtgttattttgtgctgggccccaattccccttccactcttcaaatcatctaggacagaactgatgtctgatttatgctttccccctgtagatcttggcatcattcatgtctattatttattaaatggatactgagaaaatatccatctcatttttaaaaagtaatgacatgaaagattcacatacactgtgagtcagtgaagagctcaggggagaagcagatttataaaggataaagttaatgcgtgctggagtgaggcgactgcccaataataatgtaacaaccttaggatatgtaacaggaaggaatttttatgaaattcatttccagaattcaaagaagacagtttgtagactgagtaaaaattataagcttcagtggttaacagtgtagctttctaaactggtttctgttacagtatatttacttgaagcaattgggggggtactttcttaaaacagtgttttgccttctcttaaaacactattccttctagactgtgtttttgctgctgaatttaaggtgactttcatttttctaaaaaagttacaccaaaagcacactgcaccttcttcattaaggtgaaatcatatgcctttagcttgaggacagtctctttgaaactgcttaaaaaaaaaaaaaaaagaaaaatgcagg

SEQ ID NO: 4020 - DNA, 430 bp, Homo sapiens
ttaggcaacaacctcatttctccttgtaacattcttgtttataaatggagaaactgaagcaaaaggctgttaagttaaatgctcaagacctaagtgctagtcaatagcagaggcaggaacagaaactcaactcatagtgctcattcagctcaaaaattcttagagggcaaggattaattcttttcacaaatatttatcaagtgcttattctggattagacaccatgtgaggtgaaaaatagagatggctgctgcctgaagaagccttccatctaatgagggaggaagagaatagccaagcaagcaaacaattttagatggcgataccttccaaggaaacaagcagggtacagcagcaataggataaggaggcagaggagcatatatttacacaggtggtttgggaaggcctctctgagtaggtgactttt

SEQ ID NO: 4021 - DNA, 10780 bp, Homo sapiens
gtcaagtgcgtgctggtcggcgacggcgcggtgggcaagacgagcctggtggtgagctacaccaccaacggctaccccaccgagtacatccctactgccttcgacaacttctccggtgagctggccggggggccggggccgggggcgcgtggccgcggtccacccaggggaaggaaggtggcgcgagggtcgcgaggttcccaagggggctgcagggccccgggcgcggctccagctgggaagccggacaaatgaggagtgcaggacgtttcctgagtctcagggaccgggcaagcgcggagctaacacgaaaggaccacggcggagtgggcttggagagaggagggcggagcggcagtcagagccttgccaaaaaaaaaaaaaaaaaaaatctcacaatttaagcaacagataagtaggagtgaaacaggttgagttcagggtgcccggtcagtttgttgcatagagcaaagtttcctgagggcgacgtcgctggcgccgctgcagagtttcaatcagaaggtgacgcgcaggtgcctttacctgagcgtcgctcctttgcttttaggcggctcagctcacaaggggcgtctccgctttaaagagccgcggagacgccgggaaaacacttgatttagtgaaaaagcgcgagcggccctcgtgaaggcttaggtttggatgaaacctgaagagtaaacaccatttctttcttctgagccccaccaccttccctgcccacatgggctcggattctgattgttggtatcttttcaggatccctttaagctacttaaagctcctatgtaccgggtgcgatgccatttcccttggtagatacaaagagaaaggaattctctatcttgctattcaggtctttttgaaatttaagaaaaagttaaaattcacagaaactagtatgaaacacttaactgtcttgcttctttaaaaaaaaattgcttctctgaccttcctttcatcccaaaggtaccttagagaaatgggtgctgtactggtgggttcccaccgcagggtattgtttcttcccctccccccaccccacccctgcagctgactagtataaatatttagaaacaattagaaagttgtgtagaaagagacaaaactgactgcttaattaaaatagaaacctccacaacatgtcctgctgcaggcctctccacactccccgagtccccggatcccagtggaaagggggccatggctttcttttttcttttttaatcctccttttgacctgacatagagataaggagtgccctcatttcttaaacaggacaatgcgggcagcctgtgtttgcacatgttctcaaaacacactagaattgtatgataaaccctgaagttggggaacctttcccaagggaaaacagaattatttgtgaggttttccactgatttaaaactgcagggttgcttcccatttacccccagtgttgtttttaggtcctttgaaacaagtgtgacaggaaaataaatcttccaggactgggagaaaagcataggcctttttagggtcaccatcaaagcgttcagggatttgctgcctggttcacggtaatggagtgacttgccagccgtgggtttgtatacaaaaatgcctccacagggcctccttgtttttggctagtctttaattcattagaggacctaaaataggagcaaaggggtttggagtgagaatgatagtgaaagctaaaactattagtattccgaaaggggttaaaagacacctcctgattgtcattttggttttgtttttaagcggtggtgtctgtggatgggcggcccgtgagactccaactctgtgacactgccggacaggtcagtatcacgttacagctcagtgctgggaaaggaaacagccttttaaagatttccaaataacctttgattccctcagtcagtaactgggtcattctaaagcctcatgaagtggacccacccctgctgttggcccttctctgagggtgggcaggggccaggttattggccggcaggaagcagaggaagatacctccaaactaataaagcagggtttggcccagctctgcgtaaccaggcaagggaggaagcagtgtcaagaacagctcttgtaggagtttctattacttactccctggtttttatgaaaaaatttcagtgatgctttgtcatcatttcccaaactaagttagtgatgtcttataatcgttttattaaaggccagtgagtcagatattgaagaaatttgctcaagaaaaagatggaatttacatcagtaagggttaatatttcccttcctgagctatggtttgactcgctaggaccagccccatcacttgaagcacagatacatttgtcagagcagtcctaagctggagggatgaactaactgggcttattctatccaaactgtgaacgctggttcttgtctcgagggctgggcccttggaggaaatagccagggagtgtagggttccctctttgtgttccccagaagaagcccccattggtgggtactcgagtcattgaagtcaggctgtgccttgtgaacacccaggggtacttgattttggcaaagtgatagttaatgaacttgtctctctagtatgttctagagttcagcaaagttccgggggtactttgtaggcaggtgaaagtgcccccttcactttctgaggtgccatcacatgactatctgtgtttatgaaggcactggctttccactgccccccagagcctcatctacgccagagcttccaagttgctcacctactctgggacagcagattcagagctaaggacagatcttattttttaaacctgaagatgacataagaccgtggagccttgatctccaaggaacaccgggctggtgcaggccatagcttgggagcacttcagcttggaaaaaccaagcactgtccgtattgtattgtctgtagaaaacaaaaatcaggctgggtgtggtggctcatgctctttgggaggctgaggtgggaggattgcatgaggccaggaatttgagaccagcctgggtagcatagcaagacatcatctctacaaaataaaaaaattagcctggtgtggtggcactgtctgtagtcccagccaccagccactcaggaggctgaggtgagaggatcgcttgaacccaggagtttgaggctgtagtgagctatgatggtgccactgcactccagcctgggcgacagagcaagatcccatctcttgggggtaaaaaaaaagaaaaatcaaagaatacagtcacttctagcactgaatctttctgaatgcaatggtgatatttataattcaagcttcatttccttgtatgaagtgaggatgctttgtctaccagggggtcaggttttctgagttttaaaacatggccagccaggcgcggttgctcacgcctgtaatcccagcactttgggaggctgagacgggtggatcatgaggtcaggagttcaagaccagcctggccaagatggtgaaaccccgtctctactaaaaatacaaaaattagctgggtgtggtgccgggcgcctgtaatagcagctactcaggagcctgaggcagacagttgcttgaacctgggaggcggaggttgcagtgggctgagatcgcgtcactgccctgcagcctggttgacagagagagattccatctcaaaaaaaataaaacacaggcagaggaacatgtcagtaaacatagccatcggacctgctgaagtcagaccctgaggataagatggaagtcaggaaaatacaggaagtccaaaggcacagttagcagggagccttacgggctggagcagaagctcagtgcacctacctgccccaggatgtcactcaaatatcactgtccactgggctccccgtaagtgttggctcttcaagcaggatgcagcttcttgagctggggtttcatgcccagtgcccagcatagtgcctggcacatagcagggcttaatctcgtggttttagaatggatgaaccagagaaggaccaggtggtgggggtataaacataagttgtgggcctgccccttaatagacttacagtgtggagggaagacaaatggaagctcgtgaaggagcaagcaaagggaagaaaagaggttcgggcttagaggtgcaggctggttgggcctggcaggaaaacctctgagcagagttttgaaagacaaataggaattttaccagaagaactttgcataaatgactgaatcatcaaggaagagttaaattgttcctgtttaaaaatcagggaagcacaagcatcactttagtagtatttttgcacaaaaaagtttataattagggaaaaacgaaggttttggtgctacatttgtaagtttcagtttatttgaaaattattcttctggcctcttagcaatattttcaatgagatttactgtatttcttaacctttgtgtactggttagaagagtatacccaattaaataatgaataagaccactatctaaaaatttgtagacttttagaaccaacttcaaaacttttgaagaagaaccatcttcaaaaactatgaaaaataagctgctggtaagataagtcagttgttctgtttttgttttcctgatcccccatttataaattagtctttgtttagactactagccaagctggtcaaagtggcagttcttttctactctccctagtcctgatctgataaaatacattttaagggacttgctgtgatacctgccaagtttccttatggaggaaggaacacatacctcttctaggcagttgacataagagccttgagggttaagtgactccactgacctccacttcagatgcctggagaatcaacgtgagcacagataggctagaacttggggatgtggagctggagtgtgggtttcccacagaagttgatgggagcagagtatggatggctctacatgctgaagaaatcacttcttgtactttggcttttcttgttagggagggtaggcgagtctataagatgtcaaaaggagtttttaacactggtcttacatcactcaagggcagattgatcagagacagactggaggcttgaaaaaacatacctttggcataagagaaaaaagtattgcggaaataggagtagttcactggagagttgccaatagaagctgaaaattcttcagccttttgacccataaagtacttggaaaaatcttatactgaaaaaaaaaaatcaagttgcagctagaccagagggatgtagaatccagtctcgtctctctgccccgccaaccctgatcagacttctgtgcagtgtccgtaccacagacctggcaagcacatgcaaattgcttggcctcagaacgccttttcttaagggtgcattccagttgtcctcattgcacgtgtgtattgcattatttctaagatttcaggtcaggcactgagcaggagggtctaatttctgttttatttctcaagccccttagccagaatctcaagagatctggggagatagctttccaaagccccctcagaagtcccagcccttgtgcttgcctttatttttctcagtaatgcaaccccagataccagggcatggccaggggtgcagctacctgagggggctgccttaatactggtctcagttttatgcttctttctttgaggccctctaagaacagagggagcattccattaaaagatcttcatgactgagccatagtctacctggctgtgtttctgtgtttatttattcatcacaaagttggcatgaagaaacttaagtcattatttttctttttaaaaattttttttagagagcagggtcttggtatgtcacccaggctggtctcaaactccagggctcaagtgatccccctgcctcagcttcccaagtaactgtgactataggcacgtgccaccacatttggctaagtcatactttttcaactttcgcttacagaagcctcacaagtgacattctgaaataccacattgattgctgagcattttagctggttgactttaatgtgattagttggttggctgtcgtcccgtaattgaaacatggggcctcaaatgaagaaagtacattcaaataagttacaggtttcttttataccaagagaaaaaagccacggatggagtataatgtgatgtaaatggtacttggtaaataatcggagtgtgtcaattgagtaatgaaaaacatgaatggcgttgaactttttcttgtcattgggaaattatttatacctgaggatggttggcaccaacagatatacattttacataggaaagagtaaatatttttctacaaaagagttgagcaaaagttgtcagttagctgaatatggtgctacagggaactataggatgttttctgtaaagaaatggtaatttggagaacaacatctgtctgttcacagccaaatcccctcgcctgccactgtgccttgagtgtaggtgatgttcagtgtgtctgttaaatggatgaccacgggagagcattggcagcacaaccgttggtttatttgtaatcaactctaacttattctatccacttctctatactttaagggtagggtgggcgtgcctattctccagttcttatctgtccaaagcactgtacatggaggccatgggtactggcaaggataaaggaagtaggagaaaatgaaggaaggagggaggaagagaagatacagccagaatgaggatgtattaactagtgtctgtaagtggcactgagctgcaaaagttttctgagtcacgatgacaatggactgacaaaggtcctcaactccatttctggtctggccttgagtctgattagcattactctgcgttgctgtgcatagtgtgggcagagcgtgtgcacagtgcagatgggatgaaattggcatcactcagagctgttgggaaaggcagggctggattgataaagagaggagctgtgttcgtagactgggtttgagtgggagtcttgaggatcaatatgggtgtggtctgaattttagaagagtagctaagtaccaagagttgagagtaggtttgggttacactcagctgaaggcttaagtccattttatttctagaacccacctactttgagcactttttctatgttaagctgtaagtaggtcttgagtgtcgatgaacacgttgaacatgtttggcagtgttcagaccatagctggccctgaaagcagatggctgccacaccttcgctggtgcactggccccgcttgggtaaacagtaggatcgtttcaaggatgctggctcttccttctagaaccagcgggtcttctatcacctgccagaccctttcatgaaaaatgtgaaggtgatctttttactgatgagaattcatgaaaacataacttttgggtactttgcttggttgcaggatgaatttgacaagctgaggcctctctgctacaccaacacagacatcttcctgctctgcttcagtgtcgtgagcccctcatccttccagaacgtcagtgagaaatgggtgccggagattcgatgccactgtcccaaagcccccatcatcctagttggaacgcagtcggatctcagagaagatgtcaaagtcctcattgagttggacaaatgcaaagaaaagccagtgcctgaagaggcggctaagctgtgcgccgaggaaatcaaagccgcctcctacatcgagtgttcagccttgactcaaaaaaacctcaaagaggtctttgatgcagccatcgtcgctggcattcaatactcggacactcagcaacagccaaagaagtctaaaagcaggactccagataaaatgaaaaacctctccaagtcctggtggaagaagtactgctgtttcgtatgatgctggcaagacacccagaaaggctattttcagatgaaatcgatattagaagctatattagctgaaacaactccttttactgcgtagaacctatatcgagagtgtgtgtatatgtattataggaggagctctcaattttatgtattctttctgcctttaattttcttgtttgtttgagcttagggatgagatacttatgcaagatatttttgaagtaaattaaacatttttcacatctctggaaatttagagttctagacctctggttaatttatatctaatatgaagaagacacctctaatctggatgttaagaatgaagttctgctacattataatgtacagaagagcaaaagggaggaacactatggttaaccctctcttgattaagggctacttaatgcacagtgcattatgtacacaggtcaaccatggtaacaatagttcttagctttgaaactccatgcaaaccatgccttttttttaaggagcaaaaatctgagaaaaaaagtgagagacctctgcctacaaaacctcaaaccagtcacttttgtcaattgctaatacccagttacttatgatttaaaaacaaccaacagaaaacatcccactgactgtatggcactctgtagtcaaaaaaggaaacttccttattgggacttttctttcttagtccagttgtgttgacacatatgaacacagacaaagtgctatgcggaggaaagcaagtgttggtcagtagtttcatgttttagggagtggttcctgtggagatcagaaagtgacatttgctttcggtactgtaatacgtgcaccaaactgcctcaatcctaggtaacgagggcaacagggagcacctgtctggattgtttttaaacctccatactcaagctgtctcttcggcagggaggtgaatactcttgaaaggccaacagcaagtgtttgtgggacacaacacagataattttttcttaagtcggccaagatgtacttctctgtgtgcacacccatgcacactcatgcacacagatacataggtctgtatggctgtatttgctgttgattcagactttcacaccattaatggggaaaagcgtggccacaaaaacagatgctaggaagcttggcttcctcttcttgttgacccttttttgaaccaacatcttttttattatattcagagtatgtttttaagtgtatcttaatatatacattttttaggacatcttaaatctaaacaaaaaataaaatgaacatctcttgaaacctgttaaaacaaccagttaaagccacagatggctttcagggcagtagcagcagaggccagtggactctgaggactcctgaggggcggggcgtgtagccagccaggtgcatgccgggaccatggcccccatacttggctgcttcctgtgacagtgaaatacatccttcaaggtggcagctgttagggctgaatcttctggagaaaaaggtgccatctcaggagaatagcttttactctggtaggaatgcttccgagacaccacaaggcagcctgaacactcagttgcagggtcgggcttgcggtgggtgacccagagccaccaaagtcacatccacaactaatgagggaaatctgtaaagccagttagatagaagaattttatttttctgtgggttttgtgttgtcttttttatgttaaaaagaaatccagtttgtgtttttctatagaaaaagtaaaagatcaggttatactttaggttaggggttctatttattcctgttagtaaataaaattaacaaatttctttgtttaacaaaagattaatctttaaaccactaaaatacatagactgattgattattcaacacattggaattgatgtcggtcatagtttcctgaagcatttagttacaacctgaaggaataaaatgatttgtggaaatgcttaaaatagacctaactgaatacagtctcatcttgccgcgcctggcttacctatctgtggaaagctaggcttcccaggctgggctctgcctgtctggtgcctggaggtgtgggagggaagatgagttatttaactggtaagcgatttgaaacactatttttatattaaagtaaatggcatggagtatagtgcaaattcatttttaagatagaacacaaaacttgaaagaagttttatgcgtgtgacagtgtatggggctgcagttggtctccctggaggggacttccacacctcctgcctttaggccatgggtggaaagtgctcagtgaagtacacctgtgtggcccagttctgaaagctttatacagttgaattttaagtggggttgataacaccttggactgttagtgttaaaaatctagtgggttgacctttaaatgcaacagtttttaaaatatattgctgcattttatagaatagtaaaggtacgattatacttgagattttcctccatttttatttcttcgtgaacatagagtttggggccgaaaatgtttttaaagtatgtgtttgagttaaatataaagttggttcacttcaaagctaaaaaattgttaaacttgcagcttggtattgcagagaagattttataagaattttgctttagagaatgccactttggctgaactacaagtgtaggccaccattataatttataaatacagcatacttcaaaactgtttgttatctcttgttaccatgtatgtataaatggaccttttataaccttgttctctgcttgacagactcaagagaaactacccaggtattacacaagccaaaatgggagcaaggccttctctccagactatcgtaacctggtgccttaccaagttgtgcttttctgttttcaagtgtaaatgatgttgagcagaatgttgtacttgaaaatgctataagtgagatggtatgaaataaattctgacttatgaatataa

SEQ ID NO: 4022 - DNA, 418 bp, Homo sapiens
ggaacgtgtgttccaggtcctcccgcgccagtgttcgcagtccccgcctggtcgcggcggcgcctcgggcgcgggtgcaggcgcgcggcgcgcaggcggggggcgctgtggtcttggcgcggggaccgagccgctcggccagacccgcctcttttccctccccgccagcccgcccgcctgcccgccccccacgcgtcgtgtcgccgggaagccgggcggagacagagcgcttgggatccacggcgctcggaccgctgtcctccaacagcgcagggcagagcggctggcgccgccggagcgcggagccacgaccctccctggccgcctttgtctactggccgtgcggcccggaaccgccactctccagggccggggacgcgcccgcagctgtcggtgacagctcctccctaccgcaacc

SEQ ID NO: 4023 - DNA, 565 bp, Homo sapiens
atttctgtagtttctgcatatctcacacggttcctggcaaattgaagagtgtttcatgaattcaggactttattgtgtttgctgtgaatcagtttgttttgtactgacgatgatgttggctaactcccttgtaactagtacttatttgaaataatgtcctcgggattattttaagcaatgtttaagtatgaaatcatttcattctcctaacatctcaaggaatatactattatattctactttacaaaaggggaaactgaggaacggggaagttaagtggaagctaagtggaagaatccagataattgacctctccttctattggtatgcaattgctagagcaatgatagtcctccggtagagccttagacattgtgtttattgcattcctgttccacccactgcattccggatactccaacttacttccaacacacatatgcaggcgtctctaaaattccggagatatggtcaccaattatttttatgtgcgacatgctcaaatcttaatatagtaaacgcttgtatattcataaaccagcttaataaatgaaacattaccatt

SEQ ID NO: 4024 - DNA, 565 bp, Homo sapiens; identical to SEQ ID NO: 4023

SEQ ID NO: 4025 - DNA, 405 bp, Homo sapiens
gacgggtgagttcgctgctacctgagatagtggtcgggagagtttgagggtttgcgaaagagtttactgatcgatccgaataaaagtgaaatgtgtggtcgggcgcggtggcccacgcctgtaatcccagcactgtgtgaggcgggggcgagcggatcacctggggtcaggagttcgagaccagcctggccaacatggcgaaaccccgtctcaattaaaaatacaaacattagccgggcatggtggcgggcgcctgtaatcccagctactcgcctgtaatcccagctgaggaaggaaaatcgctagaacccgggaggcggaggctgcagtgagccgagatcttgccattgcactccagcctgggcgacaagagcgaaactccgtctcaaaaaaagaaagaaaata

SEQ ID NO: 4026 - DNA, 405 bp, Homo sapiens; identical to SEQ ID NO: 4025

SEQ ID NO: 4027 - DNA, 2599 bp, Homo sapiens
ttgagaagcagaagagaattaagaggaaccagcagctggaagcactagccaaagaacattatgaaagggtcttgctaaggaaaaaaggtctatagccttggaagagattgagaatgcaaagcaaacaaaacatccaggtacactgtcccactgttatcccccagattagaaaatggacttttccaaataggatggatgcccagttaagcttgggggagggtagggtttggtgatttaaagccagaaagataaattaattgaatgtgtgtatttgttttggatacaatttttgatttggtcttttaaggtagagaaggacttttgtaattgaataggttggaaaaaatgagagaaaatgttttattagagatccccccaaggtaagatgaatagaagcttctctcagtttgagtaagggaaaagttattaccataaggtacattagtcaggtttctgcctgtgataaagttgcataacagacaacccccaaatatcagtggcttacagctcaagtatttatttctcactcatatgtctgtgggccagttgtggattgagttcaggtctctccccaagcctctcattctggttacagcagctactcagggcatgcttttcacctggcaactgtcagagctacaaaaggccaaaccaaattatgtaaacccgttgcttgtattatgtccacattccattggccaaagcaaatcaaagggccaagctcaaagtcattgaggagagaaagagctccatccactctacagggaggaactgtgaaatcacattgcaaagggtgtgggtgtataattctattagagagaacagaacagtaattcactctactgcagagagatatatgaaatcagacaccgcagaaatttctaaaatttccctaacaaatttatccagtgcatgcaactaaatgattaaaaattcaaaatagataaaatgttatctcatcttttggctctcagtctgctgagatgagtccaggacaggcagaaatctcaggtgccacagagacctccgtggtggtcattttggccaataaatatgactgccaagagactcacttgagtcaatcacattcacagtgccagatatctagacaaggcttagaaaaatgtgtcgctgtttagagaggactaagagagaaggcttttcccctcttgcctcttaaaagaatataacagttacttttaaaaatctataaattctgatttgtatgtttattttgatagaatgatactcagttgaaaagacattaaattattcatgttattttctatcagatggttttgtggtttattgataatgtctaaatttcaatgctggtgacagctcattccacaacactaattgaaagtattggcatttcctcaattagacagtggttaagtcatgagaaagagaggtttgttgtggagttgctgtccaagctccaggagagcaaattgagaatgttgccagctacccactccaaaactcaggggaagtgaagtaatggcttagaggttggttgttccatttccataaccagcaaatcactgtggtcttcagggagctggcattgaaaggccatgcatgatgtgaatctataacctccatagaataggtcaacagtcaaagcttttaggacacaggctgcatgtaccttcagattattctctaccgactgcctaaatgtgttttatagcatcatttccaaaggtgatgtgtttgtttaaatgatttaaaatttaaggaataatatttctcatttaaaaaattgtccaggtggcagaagaacattactctttgttcctgcagaggaaatacatgctgacgtggttccagcgtagtcaggaaagtctggctagaaagatggcccaggctgatcaattttattcccaaatactgcttaagagagtcatccagagctggctacaggtaaggacatagggaagggtaccttaaatacatctcattgctcaattctatttaagaaaactaaatgaaatccagaatgtccagggtcattatgttttttcaagaacaaaagagtagtcaatcccattcactgctttgaaataaatgtgaaaatggtaaatcagtgttttattagtgtaaaatcctaagcctgtgtttgtttcacggagtgtgtataaactgtaagttatcattccatcagcttttgtttttatagtcatttcttgtttcttgtctcacagtgctcaagtgatttagaaacttaccccttcaatcttataactgtttctattcatgtgttctcttaccatttttaggatacattatagaggatattttcttggcttccaggttatccttttctttgtatgtctctagtgtcatttgtttcttttgtttcatttctgtcttttgtgctgtttatttgctctaattctttgtcaactgatattttttgtctcacttttatttctgtcttcatccccagtacgtgattgatctgcaggaagaagtaagaaaattttgtgtacattttcttcaaaagaagattttcagggcctggtttaacatggtcagggaggtgaagatcgattctcagggcaagcatgagattgcagcggagcacagtgac

SEQ ID NO: 4028 - DNA, 610 bp, Homo sapiens
ctctctggccatttcattcaacaagtatctcaagtgcctggaataaagagtataaagcttgttttggtttaatggctaagagaatatggacatttcatttttcagagctttcacagaaataggcagtttgtattggaaaattagagcaattcttccttccatattagaaatgttccattgctctctctgtaatgtttctctcacagaaggctcaggcacattaagtagcttgccaggatcagccagttcaccactgcccttttcctaatgtgaaatcgtatgaagtaaaggaaatcagcttaaattaaatgtttttgtatttatgctgcaaagatgacgactatgaaagcagtcttcagtctttgttgctcttgtgtctttcactgcaggtgtcacttgctcccactccccctttctgggtagatttctttttctctcacctttacaataagctatttttattaaaagagaaaaaaggaaataatgatatctatagggtcgatcattaagtttttgtcatctttcttggtcacacccctgaggggtgcagttctttgagggtcatggagtgtcttttctcagtgtattaccaggaatagttcatcttttt

SEQ ID NO: 4029 - DNA, 349 bp, Homo sapiens
ttagtcaaatatagttttattttttaagttcagtttctctttcaacatcatttattgtgaaatgtacgacaaatatagaaaagtgcttaaatcatacaaatacagcttaacgaatgactgtaaagtggacaccctttgttaccaccactgaggtcaaaacgttgaacattgctgtcgcacaggctccttcccaagtctctcttaaactactctcctgacatttacaatgaacatttgcttttctttttacttttctcctaagtatgcagccttcaatgctatagtttttcctggtttggaactttatatacatggaatcatactatatgccatattaatatttaaaata

SEQ ID NO: 4030 - DNA, 1701 bp, Homo sapiens
ccagaatgtcatgtcaatgcaataacatctattgagactggcctcattcacatagcataatgtctttgagattcttcttgctgcatatagcaatagtcctttgctttatagagctgatagtattccactgtatggatgtaacatgctttcaaccactggaggacttttgtgttgtttctagttttgggtgattatgaataaggctgctataaacatttgtgtcagactttaaacaccctaaatttctttaggttatttctttaaggtaaatgcctagtagtgggattcttgggtcatatgttaagtgtatgcttaactttataagaaagtgccacattattttccagaatggctgtaccattttgtattctcaccaacaatatagagttgtcagttgttccacaccctcaccagcacttgatatcgtcagtatttatcccagccactctaatgggtatgtaatatcccactgtggtttaattcacatttctttaatggctgatgatgttgaacatctttttatgtgcttatttgccacctgtagtaaaaagacctggatattttggtggagtaaaaagacctgggtactttgctgaagtatccaagtctttttactacttttcttttttctttttttttgagacagagtctcactctgtcacctaggcttgagtgcgatggctcaatctcggctcactgcaacttctgtcactcagttcaagcagttctgcctcagcctcccaagtagctgggattacaggcacccgccaccatgctcagctaatttttagtattcttcatagagatggggttttgccatgttggccaggctggttttgaattcctgactttaggtgatccacctgccttggcctcccaaagtgctgggattacaggtgtgagccactgcatctggctgtctttttactacctttcaattgggttgtttgctttctttctgttgagttttgagaattctttacacattctggagtagtttccctgatttgcaaatgctgcttgatggttcccaggtgccagagcagtgctgggtatggaagctgtagcccaagtgaagatggcctgcaggagcctcctgacagggctgaggccagccggccagcaagctgttgttacctctgagtgggctgagggcacacaggacatgtctgctccagccttgagtgtccagcatgactttccagatgaggcgttcctgagccagggtttatcgaaactccttgcccagttgtctgtggttattccacttccacaggtctcattggttccttgccccactccagccaggctgcacactcgccagtcctccgtcgcagtgatccacctctcgcctgggcaggaatcagtgctcagcccttacctgagtgcattgtcagcagcaccccactccatttctggctacgcctgtcctggcacactttctttcccagccttctttccctgcctgcacaccctcctgatgcttcttccatctcctccgttgctctttctgcatctcctttgtaggaggcggtggtcttctccagaagaaccctgaatgcacaactgtactcagatttctgtctttaatcccctactctattctctctcagtcccctaggtcatcttggtaagaaccatgtctttaaatattaggaatgtgtttggttggacctctctcctgcttcttgacacaggcac

SEQ ID NO: 4031 - DNA, 203 bp, Homo sapiens
tcccatcattctatttttttttttttttttttgagatggagtttcgctcttgttgcccagactggagtgcagtggcatgatctcggctcactgcaacctccgcctcccaggttcaagcgattctcctgcctcagcctcctgagtagctgggattacaggcatacaccaccatgcctggctaatttttgtatttttagtagaga
